United States Patent Application Publication US 2022/0211063 A1 - sequence listing, part 2

SEQ ID NO: 7 - DNA, 8606051 bp, Penicillium roqueforti (residues 1,721,212-3,442,422 of 8,606,051)
  misc_feature (89140)..(89587): n is a, c, g, or t
  misc_feature (91419)..(91649): n is a, c, g, or t
  misc_feature (329894)..(330030): n is a, c, g, or t
  misc_feature (430781)..(431112): n is a, c, g, or t
  misc_feature (461664)..(461680): n is a, c, g, or t
  misc_feature (496398)..(496577): n is a, c, g, or t
  misc_feature (532001)..(532095): n is a, c, g, or t
  misc_feature (539751)..(539886): n is a, c, g, or t
  misc_feature (569534)..(569738): n is a, c, g, or t
  misc_feature (649051)..(649187): n is a, c, g, or t
  misc_feature (691112)..(691174): n is a, c, g, or t
  misc_feature (866526)..(866690): n is a, c, g, or t
  misc_feature (1032440)..(1091839): n is a, c, g, or t
  misc_feature (1092526)..(1092737): n is a, c, g, or t
  misc_feature (1210194)..(1210406): n is a, c, g, or t
  misc_feature (1240552)..(1246824): n is a, c, g, or t
  misc_feature (1247751)..(1253683): n is a, c, g, or t
  misc_feature (1258302)..(1372301): n is a, c, g, or t
  misc_feature (1374135)..(1374543): n is a, c, g, or t
  misc_feature (1457542)..(1457828): n is a, c, g, or t
  misc_feature (1505355)..(1505527): n is a, c, g, or t
  misc_feature (1513226)..(1513388): n is a, c, g, or t
  misc_feature (1624048)..(1624249): n is a, c, g, or t
  misc_feature (1669160)..(1669365): n is a, c, g, or t
  misc_feature (1761186)..(1761412): n is a, c, g, or t
  misc_feature (1817726)..(1926025): n is a, c, g, or t
  misc_feature (1933126)..(1933376): n is a, c, g, or t
  misc_feature (1963938)..(1964315): n is a, c, g, or t
  misc_feature (2150469)..(2150567): n is a, c, g, or t
  misc_feature (2196699)..(2196907): n is a, c, g, or t
  misc_feature (2250693)..(2250749): n is a, c, g, or t
  misc_feature (2391495)..(2391786): n is a, c, g, or t
  misc_feature (2493532)..(2493763): n is a, c, g, or t
  misc_feature (2532138)..(2532415): n is a, c, g, or t
  misc_feature (2536284)..(2536525): n is a, c, g, or t
  misc_feature (2786532)..(2786788): n is a, c, g, or t
  misc_feature (2859489)..(2859780): n is a, c, g, or t
  misc_feature (2873900)..(2875004): n is a, c, g, or t
  misc_feature (2881521)..(2881826): n is a, c, g, or t
  misc_feature (2897075)..(2897253): n is a, c, g, or t
  misc_feature (3050650)..(3051374): n is a, c, g, or t
  misc_feature (3057165)..(3057416): n is a, c, g, or t
  misc_feature (3069515)..(3069890): n is a, c, g, or t
  misc_feature (3075746)..(3076120): n is a, c, g, or t
  misc_feature (3305143)..(3305240): n is a, c, g, or t
  misc_feature (3318429)..(3318753): n is a, c, g, or t
  misc_feature (3502740)..(3502854): n is a, c, g, or t
  misc_feature (3538027)..(3538610): n is a, c, g, or t
  misc_feature (3783442)..(3783656): n is a, c, g, or t
  misc_feature (3992300)..(3992418): n is a, c, g, or t
  misc_feature (4005200)..(4005463): n is a, c, g, or t
  misc_feature (4027390)..(4027590): n is a, c, g, or t
  misc_feature (4058485)..(4058631): n is a, c, g, or t
  misc_feature (4267325)..(4267362): n is a, c, g, or t
  misc_feature (4352819)..(4353281): n is a, c, g, or t
  misc_feature (4361818)..(4361970): n is a, c, g, or t
  misc_feature (4393748)..(4393981): n is a, c, g, or t
  misc_feature (4451480)..(4451617): n is a, c, g, or t
  misc_feature (4461509)..(4461755): n is a, c, g, or t
  misc_feature (4481215)..(4481333): n is a, c, g, or t
  misc_feature (4533880)..(4534017): n is a, c, g, or t
  misc_feature (4590140)..(4590368): n is a, c, g, or t
  misc_feature (4668962)..(4669294): n is a, c, g, or t
  misc_feature (4737136)..(4737230): n is a, c, g, or t
  misc_feature (4766758)..(4766955): n is a, c, g, or t
  misc_feature (4834538)..(4834845): n is a, c, g, or t
  misc_feature (4927504)..(4928077): n is a, c, g, or t
  misc_feature (4945086)..(4945236): n is a, c, g, or t
  misc_feature (5082742)..(5082890): n is a, c, g, or t
  misc_feature (5112783)..(5113504): n is a, c, g, or t
  misc_feature (5314860)..(5315053): n is a, c, g, or t
  misc_feature (5372796)..(5373223): n is a, c, g, or t
  misc_feature (5459177)..(5459288): n is a, c, g, or t
  misc_feature (5480488)..(5480661): n is a, c, g, or t
  misc_feature (5535630)..(5535644): n is a, c, g, or t
  misc_feature (5567778)..(5567917): n is a, c, g, or t
  misc_feature (5599006)..(5599219): n is a, c, g, or t
  misc_feature (5727051)..(5727129): n is a, c, g, or t
  misc_feature (5743562)..(5744030): n is a, c, g, or t
  misc_feature (5807724)..(5807810): n is a, c, g, or t
  misc_feature (5920056)..(5920734): n is a, c, g, or t
  misc_feature (5922048)..(5922354): n is a, c, g, or t
  misc_feature (5942930)..(5943209): n is a, c, g, or t
  misc_feature (6011395)..(6011690): n is a, c, g, or t
  misc_feature (6325216)..(6325534): n is a, c, g, or t
  misc_feature (6397626)..(6397737): n is a, c, g, or t
  misc_feature (6604883)..(6605053): n is a, c, g, or t
  misc_feature (6843817)..(6849568): n is a, c, g, or t
  misc_feature (6859923)..(6860563): n is a, c, g, or t
  misc_feature (6915280)..(6916067): n is a, c, g, or t
  misc_feature (6919371)..(6924241): n is a, c, g, or t
  misc_feature (6950690)..(6950826): n is a, c, g, or t
  misc_feature (7010241)..(7010478): n is a, c, g, or t
  misc_feature (7088835)..(7089058): n is a, c, g, or t
  misc_feature (7281128)..(7281307): n is a, c, g, or t
  misc_feature (7435487)..(7435612): n is a, c, g, or t
  misc_feature (7580177)..(7580497): n is a, c, g, or t
  misc_feature (7598174)..(7598323): n is a, c, g, or t
  misc_feature (7639388)..(7639504): n is a, c, g, or t
  misc_feature (7648598)..(7648805): n is a, c, g, or t
  misc_feature (8007544)..(8007730): n is a, c, g, or t
  misc_feature (8053265)..(8053730): n is a, c, g, or t
  misc_feature (8129413)..(8129828): n is a, c, g, or t
  misc_feature (8134123)..(8134311): n is a, c, g, or t
  misc_feature (8188405)..(8188554): n is a, c, g, or t
  misc_feature (8240083)..(8240554): n is a, c, g, or t
  misc_feature (8245992)..(8246103): n is a, c, g, or t
  misc_feature (8305274)..(8305864): n is a, c, g, or t
  misc_feature (8314230)..(8318347): n is a, c, g, or t
  misc_feature (8345692)..(8345793): n is a, c, g, or t
  misc_feature (8408069)..(8408275): n is a, c, g, or t
  misc_feature (8424960)..(8425085): n is a, c, g, or t
  misc_feature (8481845)..(8482068): n is a, c, g, or t
  misc_feature (8597364)..(8597610): n is a, c, g, or t
ggaccgtacgccggctttccagctcgtcgcctttgacttgccggcagctttttgacgatatagatatcataccgaggggcccttcagcgccatcgaataccacagggatcatccatagctcttgaacgtgctcgcggagaccatttgacttagataactcttccagttcgtggagactttcgtttgtcgcaatgaaacagatttttcggtaaaaggtcttcgcaaaattctccagtgagcttttatacaatgcgcggcatgataacctcagagcgaccaattcctgataatccaaatggtcatatatctttgagatcaattccacgggcaaggctgcaatggacattttggctgcgtgcgcgacgtttcgagattgagaacaataataaccaaaaagctcggtttattatccgcagaaataagtaggaatcgtagaagaattgcttttcaatttcaagttccgaaattcacggggaaaaaaaacatggagttcagtgaccaggaatggcggacaatggtgtctgccagaatttgcgcgaggtagaaagcatttcaaaggaaaagaggaacaggagcagaggcgaggattgtgattccaaacaaggactagccctggagcactacttagtaagggatactgcacacaaagtaggcagtccgtccggtacctgggacaggtactgataccggttggtcgtcccggtatcaccacccaaccgagaaatgcgcactgcaagtttaatatacgcactgcaaacacgtgaacatttcaacatttagttagttagaggtaatcaacgtactgacataatacatgaaaaaaagggccgtcctgtttatctgtctttggtacaagcccaactcacctctcttagcacccattgaacacgaaaagctggagccacgataggccttttaactctggtacaaagtgccaatctatcacacctcctggcattcagaacgacagctttcatcgcgtattggatctcggtctacatatatcgagtcactctacatccgctcgcgaaatttcctggcccgaagcttacaggcgcgaccttctggtacaagttctactacaatctatttccccacaaactgcgctttctctggaaaatcgaagacctctataatcagtacggaccaatcgtacgaatcaatccactccacatccatatccgagacccggagtatcttgacgacatctacactagcggacgccgcaagcgcaatcgcaatgagtggtttttccattcctccgtccgatgggatggtcattattcaatatagtcgatcatgacgtccagcgggtgaggcgcgctacgaagggcgcgctacgcttagcccattcttcagcaagcggtcaattcaagctctggaggaccgcgtcgtagataagatcgatattttggtagatcgaatcgcagaagcccgtcagaccggagaaaccgtgaacttgctctttgctgcaggtactctgactatatatataatctctgcttatacatttggaaaagattggaataagttgggtgagcccgactaggccgaggaggagctcgagggctacgccaagatggcgcagataggaccttttactcgtcaattcctataggtagccaaagcggtcattatattgcttctacctaagttagtgacgaagctcagtccagctgctacgcttgtactatggaacagagccctgttcaaggacatgatctagactgcagtcgaagaagaaaagactagtcagcttgaaaaatctgtatcctagtctatattccaggatatccttcagagcaacctactgcccagtgacaaaacccctgctcgcctttcagcggaggcaggtttgcttgtcatggggggaactgaaacgaccgcgagatctttagccgtcattttattcctgcttcttgacaccccgcatgtcttagatcgagtaaggaaggaactggcacagcatatgccccggcctgactcccgcatttcacttgctgagctagaagccattccttatttcgtgagttgctgctgacatcagaatgattcccataacgtcatatgtattaaccaagtcctctagtctgctatgatcaccgaaggcgtgaggctatctcacgttgtttcgagttgtataccaagatacgcccccgaggaagagctcaaatacaaggattggacgattccacccggcgtaagataaacaaccggaaacttctttggcacacgttgctaacaaaccaatcaacacaacagacaagtgttatgcaatcgcattacctccttcatactgatcccacaatcttcccagaaccatatacattcgaaccacaacggtagattgacgacccttcattaagggcaaactacttcggcaaactacttcttgggtttcggccggggtaccagagtgtgtctcggtatcaatcttgctaacgcagagttgtatctcgcagtcgcctatatctgtgcccgtttcgatatggagctatttgagactgaaagggagcgtgatgtggatgtggtcatggattctgttattagacaacctagtctggagagcaagtggatcagggtcaagatcacaagagatagactccaggatgagcaagcttagagggtgttagatcgtccaaggctttgacgatatcaacgacaccgacaatttcttggagagtacgagagtatccaaatcttaccaacatccaacatttgcgataacatcctactggtccataaattgggagttgtcccaatcgagcacggattgatatggtccccacatagcaggcgctttggaaaacgccacgggaaaaaaagagtaacattccacgggataatctccacagttcgtactccgcaggttaaggtcagccagcctcaatcaaaaccactaggcttaaattagcccgaggaaaggccaccagtctcgtttgattggttcgctcaatggggctatagataaatcccacggcccacggagtttacgactaagattttccggtacttcggtgctcctctctaaccgaggggggtccccgaacttggaataaataacctttggaattgtataacattagaagccttcggcccttaaatactattcggtcatactttacaaggatctagttcaaatcaacactttatttctcaataccttatgaaaattaagaactggttacaacaaccgtacaatgtctgccagtccaagtgaaaataggccaccagtcagagttgccaattgctctggttatcatggtatggggagcactgagattaaaccaacaggactaacgtacaaaggtgatcctgcatacgaaatgtatcggcaagcgactctaggagatgttgacttcatcacgggcgattacctggccggtaggttgcttggtataaaggaaagagataccaaggactaactaagctcagaggtcaacatggcaaataatgcccagtccttccaacgtggcgaacaccccggatatgagcagacagcctggcagggtatccagcagaccatcaatgtgattgccgaaaaaggcatcaaagtcgtactaaatggaggagctctcaaccccaaagggctagctttgaaagtacacgaattggttagtacaattcctcaactataccaatctatatactaaatcaatcgtccaaatagatccaccaaaaaggcctcgctttacgagtagcttacctatctggggacgacctctacaccaaattcggccctaacatgccgcaatccccagaacaactccaacacctcgacgccgaaaacagttccatcaaacctagccctctcacctatgcattcaccaacaccaccaagcctatccctatggtttcagcacacgcctacctcggtgcccggggaatcgtggacggcctccgtcgtggggcagatatcattatctgtggccgggttgcagacgccagtcctgttattgcggcggcgtggtactggcactcctggtcggagtcggactatgaccgtctggctgggtccctggtggcgggtcaccttattgagtgctcagcctatgttacgggcggtaacttctctgggtttgatcgacaccccattgatatgtttgttaagccgggcttccccattgcggagattgatgtcgatgggtcttgcgtcattgcgaagcatcctggaaccggtggtatcgttgacgttgatactgttcggtgtcaatttttatatgagcttcagggaaatatttacctgaatagtgatgttagtgctgtgttagatgatattgtggttgaacaagttggaaaggataggtaagtttccttcttttattcatcgttgtgttggtctgcttactggagtctagagttcgtgttcatggagtacgaggctatgcaccccctccaacaaccaagctggctgtgttttatcctggtggtttcgaggcccagcttttactgaatgctactggatatgggtctgataagaagtgggatctgatcgaaagacaactccgacatttcattccgaaggaatccatcgataagatcgagacacttgaattccaaaggtacctttctctcctctttcagcttgaaccagtgctgacagaatatctagaatcggtgttcctgccccggaccctcgttcacagcgacaaagcacgacatacctacggatctttattgctgcagtcgaggccgatgccgttctcgctgtcgcaagagcaatgcaagaaatttctctcaaacatttctcgggtgcggaccaatatctgttatagtaatatccatactccaagctgactgaccactcaggattccactcctctctcgacatgcgcacagcagtcccacgtccattcctagcctactatcccgctatagtcaaacaggatgatctcgacgaggagatccacttcatcgacggacccgattctatcatctcgttcccaacaggtcatcctccagcatacaaagctctgcagccacgcgtaagctacaaccacaccccatccagcgatgaagtcgccctcctccaatctccaactcggtctattcgattgggagacattgctcttgcccgatctggtgataaaggatctaatctcaactttgggatctttgtccctgacgctactcactggccttggttgcggtcttatatgagcgttgaaagattgcgagagatgctcgttgatgatgatgactgggatgagtccttcttagttgagagggtagaattcccgtacattcatgccgttcactttgtgatttatgggattcttggtcggggtgtaagcagctcgagtcgattagatgggtttggtaaggggtttgcggattatgtgcgggataaggttgtggatgtgccggcggagattttggattgagtctttattcatcttgtgggacatatcatgggtctatctattagtgagatgcggaaattttatcatgaagtctagaagacacatattggacatgcttatcatgcttggaccaatgaacaatgcgcacatcgcatgaaacatcaattgttgaagcatgcacgatcattcatgccactgccaggatagcgacagcccaaggatccatgcttattgaataatttccctgtccattgaagacacccgtagtggtggtctgaatttgcacgttgaagggcgtgttgccttggtacttagggccagcaagcatctcaagtttaccagtttgggttcctggtatactcacttggacattctgatgttcggggccatagtttgccagtttcaagtagtattgtgaacctgtcttcgaagccacccagtaaagaggtccaaatcctgttgatgagtggactggaagaatggtgtcacccttgttggatgcgaacatcttttgcacaaaatatgaaacagaaggagtgacagagtcgggagtcgaactgaaaccgtatagggtgggctataagtaaaaacagcgcggtcagctatgtttgcactgttcctttaacgtcttctgggtagatattcttaccgaccaagacacaaaatcaaagtgttgcatcaagggtgcataagccaccattttcacaatatcactgttgcgttcgattccgatcatgtacacagcctcactgcagctgccctgcatgtagggccagtatgttcctgtctcttttgtagtattgcgacatccaaactcaccaatcatcactgattgattccgaggctggttgtcaaactggtcgaacaatttcacaaagtcatctggtgctcggtaaagatgcagatcaatgatgacattttcgggaagcggagatggcaaacacgaatagtccccgttggaagcaacaaaagtgatgtgcgggtacttgtcgtggatggccttgtagatttgattgaaacgatccggataggtgtcacagccacgggtgaggtcatcttcgttaccaatttcaataaggtcaaccttccacggatctttccggccgttctgagctcgcagtttgccataatgtgtcgaggagtcaccaaacagatactccatctcgttcatgatgtcgtggacaaaaggctcgaggtccggcccggagagaatatctccataagacttgcctgaccacacagccaggagtggcgccatgttcatgtcttcacaccaccacaggtactcgtccaggccgagggcatctgtattggggtaaaaccagtcgctctctcttcctggacggtcgactacgggtccaatcgtggtgttccacttccagcgagaatcaacttccaggccttcgaggttgttcccgcctgggaaccggagaaacgccggattaacttcatccagaaacgatgcaaggttatgtcgcaacccattttctcttcctttgaaagtgggagggaagagttggattaagccaaagttcaacgagctaccggcaactttcgatccatcgaatgtcaaatgccactcattatccccttctggtgcgtaggtagtgttgaacctagttttgaattccgtaaatttcgaatgcgtactcttcacggtcaaattgtgatcggcatataccgagccattatgcgacccaacaagccgcaggttgatggttcccgagtatttgcccatcatccagaatgaacagttgtatgtggcacccgtaacctgaattccgttgtaaccagaattggcaaatccgacatagtctttcaccccatccggcacttcgaccttgagcgaagacgtaattgctttgctgacaggctttgatctatcctgggagattgtcacatctcccaccggagcgtaggcagttaaaccaagactagttccttgaaatccattgttctgcagcaattgcccgtggattccaccatcgccttgagatagttagtaatgctagtgagcagcaaattcgagttccataccagaatggtccatttcctaacaacatcacggatcagcaacacagtcattcgcgcatagagttagctcttttctcacctcgaacataaccccatatagaagtggactcgacttattcccaccgtcccttgcgactgccagtttgacaggagcagttgaactattccctttcgccaacgcaccggctaggcatgtagccatagcaacaaatgtcgcgagaccggcgcatgacacagatccagacttcatcacgagtcagagcctatagacaagtatatagcaaagagttgcagaggagtgaaaagtgccggcaagaatccaagctcgggaaggtcaagcttttcaagacgcactgcccctgctttgaagaaagtgccttgcactgctatgggtgtgattcgttcgttttggacctggcctgacagtattctccacagaagcatcatggaccctgagatggagcccgcatgcaaatcaaccggtcataaagcctgggatctaccgacatgtagggaaccacaacgagcatctttaaacatcccgttggatcatgctatttatttcttgcacaccccaatttggcagtcttcctacatcgtggcttatgtatctgtgtgcactgcgcagacaggtggagagcagtcatgacgtcggataactcccaaggtcggatcgggatgttagcctgagcaaggcatccgaattttgccttggcatttaggcgaataacaagtcttgatatttaccagaaaagatatttcgcttgcttttatcagctcacttctgataacaaacaaaaataatgatcaaagacgagactaagtctaagaaggcggtgtctgatctgccatctcacatgtctctatttccaaatcgggattagctttcttctttccctatctaagcttgcctcgatttcatcaatattcttctccgactctgaacctcagagtgaaagatgaagtacattgtggtatctggaggtgagtttaacagtgatctgccagaagtggctccgccgttagcctgcggagaaaagcggggcagactccatatctcacgtttagcctttcgaggtataacagacataatagactgacatctctaggcgtcatttctggggcagggaagggcatcgtcgcttcgagtgcaggtctgttgctccaaagcaaagggtttgtcgtcagcaccatcaagatagatccctatatcaacatcgattcggggactatgagcccactccagtgagttctgcagatctgagcagcttctgcggatccatttattgatttatctagccatggagagatctttgtgacagatgatgggggtgagataagtcttgacctcggcaacttcgagcgttacctttcaaccactctccagcatggtcataacatcacaactgggaagatctatctagatatcatatctagggagcgagctggcgattatttaggcaaagctgttcaggtggtgccccatgtcaccaacgccatccagaattgcatcgaacgggtagcgaagatacctgttgacgaatcccaagccgagcccgatgtgtgtatcattgagctaggtggtaccgtgggggatatcgagagttcgcccttcatctacgctcttgctcagcttcgaaagagggttggcaaagaaaacctcgttcaaattcacgtagcttacgtccctgtcgtgccgtaagctcttcttgtttcaggcgagggcatactgctggaatctaacgccaggctaggccgggagcttctggtgaacaaaagacgaagccgactcaaagatccatttccgacgttcggagcgctggattgagtccacttctagtatgctctacatccatgtgtatcacgcactctaagctaattgaaaaaaggttgcctgccgctgcgaggtgccactagatccaggtaccatccaaaaaatcgcgaatatgtgctcaatggaaccggaacaggttatttccgtacacgacgggccaactacatatcacctaccgctactcctcgagaagcagaatcttctcagcatcctctgtgagtatctccaacttccacttggtcagacacccacccagcgtatcgaacaaggcaggcgcacgtggagtgactgggttcaccttgttcaaagccaagatactatcaccgacacagtctcaatcgcccttgtcgggaaatacacctccaataaagatgcatacctcagtgtttccaagtcaatcgaacatgcagccatgtactgtcacaagaaagtcaagattgtatggattgactccgcgcatctcgagcaggagacctatcagaactctgcagtcaagtatcacaaagcctggcatgatctctgtagcgccaagggcattgttgtgcctggtggttttggtactcgcgctaccggcgggatgatcaaggcaatcacatgggcgcgggttaataaaaagcccttcctgggcgtatgcctcggcatgcaactcacagtggttgaatatgcccgtcatgtgatgggtatctcggacgctgggagccaagagctccacccagaatccaagaaccatgtgatcattcatatgcctgaacgcaatcaagagaatggccgtgacaccatgcgtctgggcaagcatccatgcatcttcaaggagggtactgagtggtcaaagctacgatcgttgtatggccccacgatttctcaaattgaggagcgtcaccggaaccagtacgaagtgaacccggaaattgttgaggaacttgagaaagccggtcttgctgttgttggcaaagatgctaccggcaagcgtatcgagattgttgagattcgcgatcatccctttttcgttggtgtacaattccaccctgaatacttgagccgtgtgttgcggccgagcaaggtgtttctcggcttcttcgctgcggcggctaagtgcttggagaaaatacctatggcattgcaacagggccggcgaagccttgcggaagaagatgaagaagcgatgggcaacttttgaagctcttagcgtcatctcattggttggtcttgttcttagcgccggcgttttaagttgcattgacaactaaggaatcggataatttcaattagaaatcaatactttcattgttttactttttcgacgaacatttataataggaattagaacctgcaaattcagatagtcgtgcagttccaatgttttttttcctgacaactacataaaagcttctcagtctataccacaacataatttcactcacatagaattgcaaagataaccaactttccgaacaaagcagcatgaattactgcagcaaagataaaacctctcaaagtaggaccacctgcagaaaatgaagtcgttatgaaagtcgcctacaccgccgttaactccgtggatggaaggcaagatcttgccaactttcaggcatttattctagggtgttgttagatgtattattctaaccagattttagctacaagtataaacatgcatatgaactctgtagtaaaggtggatagcactatgactgactttgtttgagctttacatgagaaaatagaagcaaattctactgagtagagcaatattattatgtgattgatgtatttgagaacttgagccgatctagaaggtgagcagttcttccatggccatgtcgtcaatttatttcatgcaagagaaagcccggaatgcaagttgagaaagccaagcgaggagaagggaaacaaacacaatcataaccagaatccgaagagggatggagatgcacgtggacagtgaagttcacgacaagactcaacaaggtagactaccaggttgacattgacaccgaggatgatgaataagaagaagaaagaagtgggtgtataatgcatatggtggataaggataatgtgtacagagaatgtagaagaaaggtccgagcctaggttttaggtcagatcaaaaccaagacagaacgaaagtcctgccctgaaaggctggaaagaaaaggctttgccaaattggaccaaagaaggtggtgaggccgggtaggagggagggaaggtgtcacatgttgtcggaggggctgcgttacaaggccaagacaatcggcttaattcgtcgcccgcttccagaacttccagccctctctcctctcctctactccgacgccaacaagacgctcaataccttcagggccctcggcattttcgaacttctgttgatcgatctcttcacctccctcttcgtccgatccattacgtaggacggccgggtagagaacaccgacaccgtcaccgccgagggtaacctcatacgtagtgaaaccctcctcctcaaacctccgttcgagatcctgcttgacttcggccttcgcgttgggccggaggagggtaatggcacatccgccaccgcctgcaccggtcagctttgtccagccaatgtcggcgtaatcgacaagttcacgaatacgttcgaggcgggggtgggagacgcccagggagacaaggaagccgtggtttatacggatcagggttccgaaatgggcgagggtggcctcggagatgccctcgaagctagggtcctcaatcaaacgttgtgcagagctcgtcacttgatcgatgccgttaagtattgactccgtcacgatggagtgagcgtctcttagagctccgactttgtcgacttctgtctttgtggaacgcgcttgttgggtgtcgacaagtaggagagggagttcggggaaagtaggtagcgagacgactgttggaggtttcgtgtaatcatcgcgtcggaaaatcacagccttgccgcctgcggccactgtgttatctaccccactgggattgccatggatgcagagctcgccgacgaatgcccagcggttgatacgttcgatctgtgtctctgcctcctccggtggctggtctgggtggggcccggcgagggtacggatttgaagaagcagcgcagaactgagacagacgcagacactggcactgctgcctaggccggctccggtagggatggtggatcgaagagtgtagatggcgcctgggctttgcggggagcctaaggagaggaagagatagaggaacgaggacgcggagcggatgtgaatattgcgctgctcctctgggaggcctttagagacgccctggaggtgtggttcgattgcctcgacgagttctgggtcgagttcagtgacaaggctgtagtaaaacttctttttggacggctcgtggaacttgtcccaaggtagggtgtcaatatcccaagtgtgactaagacccaagtcccggaagttcagggttatcgtgcgctgcgatttggaaagggtagtgacaagaaggtaggagcgaagagagatggctgcggccatggcagccttgccgtggaccacagcgtgctcgccaaagacgataaccttgcccggcgcggacaccatgaaggtaggtgccatgggcgaagaggccttgcgagtcattatcgggcggtttcgttccccagtagcggttgcttcgtgtgtttctgaggcggaggagacggaggcgctgtcggagctatcgtcccggacacagtttccgttcatacccaaggggatgactttaaccgtgctttcgggatggaaatcgactgtacgacgtgaaacgggaattgtggcccccataccgttcaatgggcgagtggcattctcagtcatgacagtggaattcgaggggcgagaaaggggaagtgattaggaattaaaaggatagaaatagaagacaagtcaacataagcaaaagaagaatgagggggggagtagaagaatagcctaagttagagatagcccgagttatctggagtaagcaaatggagtccaaagttgggggagaagtgattgaagctactgggtataccagggaacgagagagaaacggtccaatcacagccacaacaataccaattggtcatattagacctagttaggctgactagttagctagttagttagctgttggcctatttcgtacttcgtttcccgtctcgattactcgttatgtcccttcgtcttggacaattctgcctttgcatatccaagtgcagagatttttgtggcgtgcagtagcgccgggatcgtctctatgccttaatacatacttccaatctaagaaaatctaatgtgctatgtacaatgctgtattcatcacaaattcatcgtcacggtcatactgttactatgcaccagtaaacaagggggcaggccggtccacagaacatccaggtcactcaaataagatgcactgtcctcggcactaagcgaagtcccctccacgggagacggcagagtcgtgaaaataacggcggtatcaccactctgctggaccatcaactcgttcagaatcaaatgctgtgctcgactcgggaggtcattgaaagacaatggaaccgacgctacaccagggtatcctgttgcatgtgtatgtgaattgctgggggcaccgggggagggagaagacacgggagatgggcgatgggagtagatagagtctagcttgtttgcagatcgtggaggtgagctttgcgccgcgaacatgatagacggtccattgccgtcttcggcttcggtgttcactttggcttcagggataggtgaggagctgaaccgatttctggaggcagaacggctgatggggggccgaggacccggggtattgcttttcggggagccatcgtcgccagtctcaattatagatgggattatctggttggatggcgttgcctctgcttgagggctcgcactcactggtgtgctcggggagtctgcgctagggctgcaatcatcggtcttggaccgaccaaggagtcttgaagggccgggaacaggtacatcctcatttcgagccctggctatgtcctctccgccgtcttctggctcgctgacatacgcttccagatcgctgtcgtcgctctcactcgggctatcggagctgtcgtagtcgacgaacgcatccagcaagcgatgcgtttgcatgccaaggttcactccgcctagagcccggaagctggagacagatcgtctgcgacgagtggactgaatcagtttcctcaagccagtcacccgatgatacaaaggtttggctccactgtcttggctcgatgatccttgccaggtatatgacttatcaagatggaaactgtcgctggttctatccgaatcctgcgggtcctgatccagcgcacgagctcgtaagaccctttgccaccagtcctccccctgtagagcagaattaaccctctcttgggcatcagctgtaaccgaagtgccattcacgatggtttgataagcctggagatcaccgcaggcaagccagaagaccaagacttcggcttcaatgcgtaatttctcaaggagggcctcaactcgcgctctttcatcttccaaatcggtctcgtactcgacgaacaccgcaactcggattttgtatgtcttcttccacgagggaacagtgttgagaatacaacccagttgaaggatcaaagtgtatgtgtcaaaattagtggtcagcacattttgcttgctttcactatcagccccaagctcggcggacatttggatcggccacaaatcaatatacttcttagtgtgacgaccgcgggggtccggtagctccagatcttcgaatcccttagctacggcaacattgatccgaagcttgaataagagatcttcgaggatcgtgacataacactgcccactcatgggcgggtttgccgccccagactcgctgggctcctcggttcgcgtgctcgagtggagcgaatggcgtctaacccttgaatctctacgaccactggtataggtttcaacaagcgactggtccgatcggaattggtcaatcacaacgatgttgggcctcatgccgcccagtccggaattcaaaacaatatttcgcataccccattccgcagccggggaaatggcaatgttgacgaaggctttgatcttggaatgctcgacgaattttgtccatgctgtctgttggcgacgtgcttcggggacagctgctgaaaagtcatcggtcacaagaacatgggccagcacaaacaaagatcctttcttcaacgagttgcagaaggagaccattttgtattgtctgtcgaggtcgctgacaaagagcaggatctgaggacgccagaacttgacgtgctcctgacgcaggcgaagcaggtattttcgcacttgatgatagatcaaactttgactgacatcgccccaaggcttgggtggcgagctataatggatcagcaagaagagaatcaccaggatgcctacacatcctgtagcgtagacaccgtccacaaaaaacatgctgatcccactgacgagcgttccagccgctgcagtctgccagttgaagtagtggaacgacggacgaaagttgggtgcagagccaattttcaagaggaaacacgcgaggttcgtcacaaggaaagtcatcaagtaggtcatggtaacaaaagacgcgatgcgattgatgtcgaagagcattgtgatctgagcgaacacaaaggtcacaatgatggcatatacgggatcgtcggttttatgtgtgccttgggcaaatatccctataccaggcaagaggctatctcgcgcaatagcttgaagaagtttagctgatccaatcacgcccatcagggcagaaaagaaactagttgcgaattcaccgagaagaatcacactatcagaggcattcacctacactcaattagagcgtgcttgtagttattctctcaaaaaagaaggacttacgatttgtataacattcacgttattataaaaagactcccgggtcaccgaggccgccatcgcaaggatgacaagcccatatgcgacaaaagtcaaagctaacccagagagcgtacccttaggaatagccttgctcgggttcttcaaatcaccagacatacttgcacctctgatggccaattagtgaaatggggctgaaagtctgctgtcgccaacttacgcaaaaatacctcctgttgcaggaaatagaatgccaaaaaggtcttggaagttctctcgtccttttatttggcttcccgcggctcccttggttagatggggtttgagattccccatcagagttttcaaacgaattcccgtgaattccacgccctgacgggggactgggaaaggcttcatgaaaactgctgagagcggtatgctgaaagttgccacgagtagtatgaccaaaagcccgttgcttgccctcgcaaatatagaacttcctgccaagcaaaccccggtgcaaaataccaatataatagttccccataggtactgccaccaaaagccttcctccaggaagttggcccagtccccagactgcgccccaaagttctgggtaaaacagtccactaaaccaacggcattcatgccggtattgaacacatagccaagatagaatacaatgccaatagagccaccaaattcggggcccagagatctagaaataaggtagtaggcaccaccgcctcggaccgttccgtttgttgcaattgcggatagagacatcgttgtcacaaggttgattgtgtatgatataagtagcagcccttcgatgtatcagccgtggggtcctgactttgcgagaacctatgctcacctaatatgcccaagacaccagcttgtcccaggatgaatccgaaccgaaggaacataagaatgctcaggacattcaatgtcgtgggaacaaagacgccagagaaagtaccaagcttcttcggctcatccatcgatcgggatcgatgtccactcttgtccttcttatcggcgcgggcgtcacgaagggaatccgcagacaggtacacattttgtgaagtgttctcttcaccagtctcctgctcttgatcgccatcccctcggttatgccaccaccgagaaattttctggaagtaattcatgggtgaggaatggcgtcggccctcaattggttctgccgaattcacgggctcatacgggcgggcccatggagtcggtgaccagggtagcagtcgagtacgttcgtcggagttagcatggtccgagtcccccgggtcaagacgtgagacatcctcttgagcagttcgagtcgcgaaagttgggcgtcgacgggacaaggagtcggaggattctaaggctcgtttcgccatctcagttgcaaaatttatggtatgagcatgaggacataaacaacaaaataatctagataacagaagccaatagtcccagcaagactattgagtccgcagagacggcgctaatattaaatgaacgagaaggaaaaacaagcggtatcaatagatgacgttgataggtgcaaacagtttccagtttgcatcccgtcaaccgcacttaggagctgatcggccacggactgcttggcgctatttttgtgtctcaaatcctcctcagttacatcctagccttttcactcgaattcttctccgaggagctgactgcactattgctttaagcttccggccttcttttcatgcgcatttcccaggcctaaacaaggcatcctgctaggagctaacttgaccctgaggccaccttcaaaatggcggataatggcgagggtccatccctaaatccagctcgatctgtgccgatagcctcgtcctccgcgcgctcgaggtcccccgcacctgagttcggtagcagacaggcttccatggcacgcctcgcatccccagtgccctctccttcattaggaacgtccttgtcatcacgacagggtattccggccagccgacctgttacaaacaccaccaccgagcaggagttttccagatcgattgccaatccatcctcgatccccggtcctggacattctatccttgcatcccaactccaagaaagcctcggtcgttcgccgccgagatttggaactccgtcacgacacaacggatcccctgcggtgcattcgacgttagataaccgaccgttggcctctcagtatggctctttcgatactaaaaacggagtcgactcgtcgagcatagccccggtagaagaccctgaagttatcaagcggcatctggtcacggaacacacagataatcagtcggaaattgcgaccagccttggtggcgaagatactttctcgagtctgcagcttcaaggtggtgatattacacgacaagtttaccgttgggcggaggatgccgaagctgaagccgcagggcgattcttgcgcagcaagagtttcagcgtcagtcgaccaaggccggagacggatacggaagacattgacacaattcgggtaccaggagggtttcgcagggattacctacgaagagcagctggaagtccacaccgcggagatgcccacgggtcaaacgtagggccgccccatggacacggcgcacctcaactgccgactaccagcttcttggagttcttgactctctatggacactttgccggagaagaattggaggaagatgatgaggtactagggccggatgagtacttttcgtctgatgcctgggacgagccagatgatggcagagagtctggagaagacgcagcgctgttgccgcctgaaacaccgggtcggaagaagagaaagcacaagcaacgctcaccggtagggacaactaccacaacaggtgcagtactcttgctgctcaaatcctttgtaggtactggtattttgttcctacctcgagccttcctgaatggtggtatgctctttagtagcatggtgcttctgggagtctcgattctcagctattatgctttcattcttttggtcaatactcgcacgaagatcgaagggtccttcggtgacatcggtggcattctatacggcaagcacatgcgacgcatcattctcggatcaattgtcctgagtcaattaggctttgtggcagcgtacattgtcttcgtctcgcaaaatttgcaggcattcgtgctagctgtgagcaggtgcgcaacgttcattgacatcaagtacatggttttgttgcagctggtcatcttcctgcccctgtctttgattcgggacatcagcaaacttgggtttaccgccctgattgctgatgtcttcattcttttgggtctcctatatatctactactacgatatcagcactctggttgaccagggcggcatctcagatatcgtttccttcaatccaacaacctggtccatgttcatcggtaccgccatcttcacctacgaaggtatcggtctcatcattccgattcaagaatcaatgaagcagccaaacaggttccctggtgtcctggccggcgtcatggttctcattacctttatcttcctctctgccggtgccctgagctacgcggcgtatggatcggcaacgaaaaccgtcatccttcttaacctcccccaggatgacaaatttgtcaacgtggtccagttcctctattcacttgccatcctgctgagcactccgttgcagctcttccctgctatccgcattatggagaacgagcttttcacccgcagtggcaagtacaacccatatatcaagtggaagaagaacggcttccgtttcttcctggttatggtctgtgcccttatcgcctggtgtggtgcgaatgatctagacaagttcgtttcgctagtcggaagctttgcttgtgttccattgatctacgtatacccggtatgtcttatcatgtgtcctcctaatcaccacagaactgtatgactgactcagtatatcactgtagcccctcctgcacctacgcgcttgtgctgcctccaagcgccaggcggttgccgacgtaactcttgctgtcttcggcgccatatgctgcgtctatacgacgtacctgaccctcatgagctggatgggccctgacgtccctcaaagcccgggatactgtgactctctttgaaaaaaaaatctacattctatatcatgtagagcgtggcgagacaggttttgttgcattcctttgttctgtctcaaccctagactggcatgtctatcattgggttctcatatgttccttcaacgcatggacggaggtcatactagggacattattcacagtctcggtcaaactgtgagtatagtgggcgcattggtgtcagactaccctttctgtatacatactttcttggttttggatactatttactctaccatatttgtggagcttcctttagaagttcatctgaccgggaataaatcaaggataggacccagcctatcaccgaatcccgaagttgtcacggagttcatcctaaaaggaatatgattcgagcgcaacaatatagagcctatgtacagtgattgtcagcaaaccggaactagattgcagccagcgtcgatatctaagcgtctcccttaaaaccgcaggtcttcctctatatttctcctcttttattattggccggggctcatctggtctcatgacataaacccgcaggccatattggtaagaaggtgcaattctgcgaacgagacagatgctatagccccaatacaaactgaaaggaagcaagcacaaccaattccttctcggagacgattcttaagcaccagcctcggcagctgcgctgcccttagcagcctgctcggcgagctgcttttcccggcctccaaacctacaaagtaggaccaggttagtaatcacgattatagatgcttgtggacgatgacaaaagccaaacaaggtgttgggggatgaagcgtacttccagtagttcagataacggactgcctgagtaccctgggcagcgaagttggttacatggcatgcgaagaggaggtagttcttgggggtaacagcgagggagtagcgcatgaaggtggcagcgtagacgacgagggcaccggtcatggggccggagatgctgtgaagatagagctatcagtacaggttctctgagactcaacagccaaggatgagatggaagatgaaaggcgaagctcccattattcatcggataaaaacgtacatctcagcgtccttctgtgtgtccatcacggcggcaatggggataccgaagttggagacagggccccagaagtctagagagcatcataggttgtcagtaatttgtgcaattcatttacacttcatttctttagaaaattgcaagctcgaaggccgaaagcgtgtttctcccatcctcaacgtcgctttcagtgctcagtcggcgttggccgacctcgggacggcaatcgcgccgagagaaactggggtcaataatacgtacgggttgagcagacatagtccagcaccgagttagagcggatcttcgcgttaattgccttgatagcagccgccattgtgaaattgctgagagttatcacacaggattagattcggagaaggaaacgtcggtatctagaggatggggaagccgactcaccggctgtcggtgtcggcgatgtcacgtgcaatacattacattatcatctttgttgaaactgatgtattaatatataaactttgattgaattttagtggttatgtataatatggtagaatatggtagtccgaagctcaatttaagacaagtatcagagatatatatcggattgacctccacttcgaccatccaaaatctatttccatgttacgatctaaccaaatcatagagaggaaaacgacaactagttactgttagatataaaacgccaggctgtcacataggcctacatggccactagagtgcaaggaaggcccggtacgaagtatgttgggtagtttagatagcatatgatatagaagacacagcataatcgagagaggaagtggagatgaagaattgggatattaaacggttgaattgaagaggctcgtttaaaaagctagcacattttttttgacttaatgcgtaattcaagaggattttggtcttttttgtcccgttcctcgacacgacctccatccatgcgccgcaacgcctaacccagtagaactcagggtgatctagcctgtccgcgtatcgttatctctcgctggaggtgttgacaatggctattattctgcgccgagccgcccttgtttctttcggggtgaaatcagatcgtcgataatttgaagcatagaatactgcttcgtacatatttccaattacctgccaccgaatccaggaggggggtatccgcgtccctgaccgggaggctggaagccaggaggaggttggaaaccgggagctatgaaaatggaatatcagtatgggagacgggatgggacagttatctctgcgcaaacttacgaggaccaccctgaggagcaaatccaggaggaggcgcgaaaccagctaggaagaaaccagtcagtttgagtctcagtcaacctaggaaaatgggagtatttacgaggtccaccgggggggcctccacgtccagcgaatccgggaggaggggcaccagggaaaccgccagggggaaatccaaagccacctgggggtgggggtccaccaatgccggctgcagggcctccgagtccgataggaaggccgcggccagcgggcttgctgataccagggcccgcggcaagagtggcagctgcgccgggtccggcggtgccaagtcgggcagaggggtcggcaggcggaggaccttcaacagagcaagagacgacttgagtaccgcgcacgatagtcaggccgaggcttcgcttctcttccgcttcgaccagcggggcgtttgtgggaccggcagtgggcttagatttccgcttgatgcgacggaattcttctgtgtcggcaagaacaaggttcatgtgctagataacggaaagatcagctgggcgcctcggtttccaaagcgaagagaaataccttatcaaaggcaagcatggaaccagtcatttgacgtccatcgttcaatgttacgcgcatccggtagttaatctggaggagttagatacttcaatcgagtactgaaattgatttggaccagactgacaaggttttgctaaatgagagaagttagcgacagccattgaccaaacgggtttcgggggtgcaaatgggaatgagaaactcaccatcttgtgggaagccatgttggctatagagcgcgcacggatgcgacttaggagactgagtaatagagatcagtagaaagagaaagtttttctactgcggcggatgaagcaaaagtgcgagatcctcccaaggatgcgaagctcaagcttgtcaggtgctgccagttcttgatactggattacctaaaatatgagtcagcccaggttcgcaattttaatgcctcaggcagaatgcgggtcagaaatattaatgactaagcgcttaaattagactcattacctaagcagcaatcagggcttccaaatcacgtgtgggaacccacagtccacactttctctttttccgcgatcacttttgtctcctcagtcgacaaccacttcacgcccaaccgccgtcatggtacgttcagctccttgcaatccaaaccaagcattcccaatagaatgtattgttttatgtcattccatttgatatgggctgcaacctggacattttcgtcttgcgcgcacccaatcttcaattccctgaaatatctattctttgactagatacaccatccacaagttgagactaacatgatgcagtccgcccaagttgctaaggccgagaacccctgccgatcccttcgcttgtcgaagttggtcctgaacatctccgtcggagagtccggtgatagactcactcgtgccgccaaggttctcgagcagctgtccggtcagacccccgtctacagcaaggcccgttacaccgtccgtaccttcggtatccgccgtaacgaaaagatctccgtccacgtcaccatccgcggcgccaaggctgaggagatcctcgagcgtggcctcaaggtcaaggagtacgagctccgcaagcgcaacttctctgagaccggtaactttggattcggtatcagcgagcacatcgatctcggtatcaagtacgatcccggcattggtatctacggcatggacttcttcgtctgcatgtgagtttcttactgatcaccggatttggaggcaatttatctcggatattaacaaataattccagggaccgccccggtgcccgtgttgccaagcgccgtcgctgccagtccaagatcggtgtcaaccaccgcatcaccacctccgagaccatgaagtggtacaagaccaagtacgatggaattatccgttaagtctcaaaatcagagataatggctgggtagggcctgtgaagtacgaggtactcgacaagaaccaaaaaattatcccgagtactcgaggaaacaaaatttgtggacgggcaccccactgccagtcggcgggcccctttgatctctgcatccaacaatggtcttgattttgtactccggcaaccaggataggcgtgggagagacatgaattgattattacctttttactgctgcttttcccttttcacaatgaggcttcacgagaggtgatgttttccgcataaccattgttgaattggatggcggacgctgggtttcgacctagtgtctagccaagactcgcttgagaatgcctcataggcttcgtcaaagagtcggtctcttttccagcgagaattttctcgtggtggattgagtaccttgttctggcctatcttgtctgtccttatcctatcctcgtaggtgcaatttgcctggcatagaagtaaatcaaccagtcgtagcttgtagattgacaatatggtcctccgatctgtcgggaatgccgacataggactgtccacgcttatacaatcatactttgtggccgcttcgacaacagccttttctacagggtggtctggcctatcctcgaccataaattgggccataatggcgcgaactggccatctcgccatatattttgttatgtgtatcaaccgaacctgctaatttctacaacctaggcaattaacatgtcccgctggtcgatccccgcgtcttttaagtccggtccacgtacgacttgccgagtagctcgtctcttcaatgtacatcagtcaattatgaggcttttatagaaatacaagaagccactagaatttatcttttgtatggatgcccatgtacaaacattgagtaaagcccgtatatcgtgaccataatgttgaatgttaggaatatatcttgattctaagagtttagtaactagttacctagccagtcaattatttatttgtttggaagaaaaccttttgattactatcctagggttgaaaattgccactactcttattttaaacatcgattatctgtaaataaacagtctggagcatatacaatcaaggaccatgtatggtatgctagctttatttcctctccaagtaacactgtgtggttgaggtataagtacaaaatgtacattctagtttacgtgtttcacgttggaccatgcgaagagccaggtatagtgtcatttcattctctcttattgttcttttgttgtccttgacgtaaatgataatgtaaagtatccagggaagatatagaatatagtaggtgtaagcctatatattgcacttcccagcatggcgaaaggaccagaaatcaccaccactaagactgaatttacaattttttatccaccatctcaatattctcgctactcaactcatgtttatcttcacctgcttccagatccatggttttggcatcggcagcctcatcaactccagccacaacactttcgaaccggcgaccacgtttctcaggaccaatagcagtagtgatcatgataccgagagcaatgatggcagttgccactgccatcacaggcccataggcctcaacacgatggcctgttgtactagtaataaaggtagactcggagactgcgtttataatctgcgaagatggcgaggaaatcatatttccaatctggtatgtcagacccgtgaacgaagagcggaacgctgggggagatagttcggctagatgaacgggaatgacgccccatgctccctgaatgaagaattgcatgaagaatcctgtcacactcagagacctctcgccttctgggaggatccatgccgggatgaggactccagatgccaaggcggcgacgatgattgctcggcgacgaccaaagaactgggataggtagccgatgatggttccgcccacacaggctcctgtcttcatcagaatagaagcccgtgaggcgccttcgttatcaagctcctttgcagtgagcatgaatgtggtgtacgaatcttgggatgtgtgggaatagaaattgaactaacgcgggacaaattagacaaatgctgataggagccggaatagcggttatgacatacccaggtcatgagaatgacacagtagatgcacatgcgccactccttgcccaacatgcttactgtttcacgccaaaactcgcctgcattcattgttcgcttgccggatttcctggcttcgatgaaggactgcgactcggggaagcagatgcgaatgaggccaattgcaattgagataccggctgcacaggaatgattgttagtgacaggtaaacagtattcgatggaatagtagactgacctgcaatccagaatacggtcttccaagtatctgttccaccgccaacaccaaggttggcacatgctgcaaatacatatcctagtgaatacccttgttgaaggattccagacataagacctcttgcgttgacactggttcacaagatgatcagcaaaagtcactcagccctggatgataatactcacgggcaatgttccaaagccatcgaaatagcatttccgtaaacgccacccatgaaaagaccaaagagacttcgcacagccaagaactgctggaaggtcttactataaatggtggcgatttgcaagattcccagaataatcatattgagcaccatgggccatttacgaccatatttgtcacctgccagtccaaagaatgcagctcctatacttcgcagcagcagagtcagagtaatggcagtcgtaatatctgttttggacttgtcgtagtatttcgccagctttactgtctggatggagagggcatggaagtcaaatgcatcagcagtccaggcagcgagtcccaccagaaagaacacccagtctcgagccgaaagctgcgccatcagactgaaggggttcttgataggctctggggattgccattctgcgtatgactctccgtgttcgttggtcacctcgacacgttgcttccagatgaagagatctccgatggactgacgtgctgtggcgagcataccatcaggaatggggtctgccctttcattggaagatgccattatggcgatctatcaagagaaggagacgagaaaaaaagaacgaaaggtcagaagacagaagaagcaggcaagtcaagctgaccaatagaaaaaccagatcactttgaacaaagcggactgactagaaaatttggtagtagactttgtgggattcttctggaaaatctgtggcatatccctttcaatttatatgtcggcgctcgccattttataggtacacaccgcgttgtcccccgcatctccatcccgcatttcccccgtgtcggaaaataacaaatgccgctgcaccccaggatgcccgagtttcggactgataaaatgccactccgctggtgagccaagcggatgccaagggcttggaagcaccgtgcctccaatgccaggacaggacatgagcaacagaccgcaccacacactttacggctggcttggcgtggagatgaacttgaccagaggtcgttccggacttggctctgcccacatagacaagcaccagtaagccgcgtggcgctgtgcgcgtggtcattgatcggttacgccgagaaccttgagtgaaaaatgggccgataggaattccagtgcctccggtttggtctttaatgtcagtttacggcgaagggcatcggaatatagcttccttcggggctctagtgggctctagtgggctattagcagtcggttatattgtcttggtctggggaagtgtgttgggggcccactaaagctggtgtaatagttagctcacttcatatgtagtttttttcatcttcaaaaatcagaacaaataaatctgtaacgcatactgaacgtacagattgaggaaggactaaagggacataagcgctgctcacacgtgataacttccgaagaatcgaggcgcaatggtaatactggttagatggcaggatccgctagagtggaactagttagttaaatgggccaatcaatccctaatcctgaatctcctgagttcgaaagtcttggctttagccgcgagaggctacaacttgctgagcttggtcaagggtaaaatgggctggacatgcacatcccttgcgttcagggtccatggtttaagggccagcttatattttcatgtaggcgtccacagcttgcatttggagaaattgggtctccttagaattagtgatatatgttcagagggtacggagtactatttgacttgaaaactcagagaacgtggccaggcgggtgagtggtaagaggctagagccacctacgtgttggtaaacattgtgaaggcggtcagttatacctctaacataggtagagatatgaacttgagctgacagcatacactctcaggttaatttgacaaacgagatatcaatgagtttgctacctaactttcactttgctctctctttctttttctttcctacctacaaacactgcatctgaaagagacgatccagtaagcccccgtgtcacgtgatcatccataagcgacacctcagcaacgacggcagcggcctcctgaggtcacttccgcatctaccagatctctacccccctcctcctctcttcatacatcttcttcttcttttcctatttcgtgctcccgacaatcgcatttcatcaccctttttcatcatacttcaattcttttgcctttgcgtggcgtttcattcagcggactaggtcgtactgcggcctacgtaaatatggcacctctccctatcaagttcacagagctggtcaatgtacgtgcctacccctcatctctatcctataactattgaagctttgaagctgacctgcgcctgaattgtacagttgacctctgtcggcattgcggtatgtacaaccaaccatgatcttcgtcgagctttgagacggatgcaccggccgcgcatcgcaatattcctggatatgttaggattgctactaactgttatgcttacagccggcatcaattggcttcacttcatgtgtaagttgtctaatgtcaccttgcgactgaccctcaaaacatggatgacaaggcccggctaacttgacattctttcgctttagacactagaatctgatcactacgtctgtgttcgccaaaagctagacgatgatgccaaaccagaggtcatcattatcgacctcaagaacaacaatgaagttctacgacgcccgatcaacgccgacagtgcgatcatgcattggagcaagaacatcattgccttgaaggctcagggccgtaccattcagatcttcgaccttggcgcgcggcaaaagctaaagtcagcgaatatgaatgaagatattgtctactggaagtggttcagcgaaagatccctcggtttggtcaccgactcagcagtttatcactgggatgtctacgatgccacacagcagaaccctgtcaaggtgttcgaccggcttccaaatcttgcggtatgtgatttgccacgtggatacaacaatggaagcccggtatgctaacttgcgtctactctttagggatgccaaattatcaactaccgcgtcaatgccgaggagaagtggatggtcgtggtcggtattagccagcagcagggccgggtcgtcggatcgatgcagctttactcaaaggagcgcggaatctctcagtttatcgaaggtcacgccgcctctttcgctagcattaccgtcgagggctcccccctacctcacagcctcttcactttcgccgttcgtacccaaacgggtgccaagctgcaaatcgccgaaattgaccaccaagaacccaaccctcgcttccagaagaaggccgtcgaggtgtacttcccgcaagaggcggtcaatgatttccccgtcgcaatgcaggtgtctagcaagtacgatgtggtctacctcgttacgaaatatggcttcatccacctttacgatctcgagactggtacttgtatcttcatgaaccgcatctccagtgaaacgatcttcaccacgactccggattccgagggagccggtctggttggtgtgaatcgcaagggccaagtcctggccgtcagcgtcgacgaaacgaatatcatccagtacctcatggagaaccccgccatgtccggtctcgctatcaaacttgcctcgaaggctggccttccaggtgcagatcacctgtaccagcagcaatttgactctctcatggcctcgcaggattacgccgcagccgccaagattgctgccaactctccccggggtttcctccgcactctggaaacaatcaaccgtttcaagagcgctcctcaaaccggtcagatgtcggtgatcttgcagtactttggtatgctgctagacaagggttcgcttaacaagtacgaaagtgttgagcttgtccgacccgtcttgcagcagaaccgtaagcacctgcttgagaaatggatgcaggagaagaagctggagagctcagaggagctcggtgacattattcggccatacgacatgtctcttgctctgactgtttatctcgaagctaatgttcctaacaaggttgttgctggattcgcggagactggtcagttcgacaagattcttgcatactccaagcaagttggataccagccagactacacccagctgcttcagcacattgttcgtgtaaaccccgagaagggcgccgagtttgctactcaactcgccaatgaagaaaacggtgcattggtggaccttgaccgcgttgtcgacgtgttcctgtcacagaacatgatccagcaggccacctcgttcctcctggacgctcttaaggacaacaagcctgagcatggccacctgcagactcgtcttctggagatgaacctcgtcaacgccccccaggtcgcagacgccatcctcgggaacgagattttcacacacttcgaccgtccgcgtatcgcccagctttgtgagaatgccggtctcatccagcgtgctttggagaactcggatgatccagctgtcatcaagcgcaacattgttcgcaccgacaagctgagccccgagtggctaatgagctacttcggtcgtttgtctgtggagcagactctcgactgcatggacaccatgctggaatcgaacattcgccagaacctgcagtctgtggttcagattgcgaccaagttctccgatcttctcggttctaaccgtctgatcgatcttttcgagaaataccgcactgccgagggtctttactactacttaggaagcattgtcaacctcagcgaggaccctgaagtgcacttcaagtacatcgaggctgccaccgccatgaaccaggtcactgaggttgagcgtatttgccgtgagagtaactactacaaccccgagaaggtgaagaacttcctaaaggaagcccgcctgacagagcagctccccctgatcatcgtttgtgatcgtttcaactttattcacgatctggtcctgtacctctaccagaatcaacagttcaagtcgatcgaggtctatgtccagcgcgtcaaccctggtcgcgcccctgctgttgttggtggcttgctcgacgttgactgtgaggagagcatcatcaagaatctgctttcgactgttgacccagccgttatccctatcgatgaactcgttactgaggtcgagagccgaaaccgcctcaagttgctcctgcctttcctcgaggccactctggccactggaaaccagcagcaagctgtctacaacgctctcgcgaagatctacattgacagcaataacgacccagagaagttcctcaaggagaacgaccagtacgacactctcattgtcggaaagtactgcgagaaacgtgatcccaacttggcgtacattgcctacagcaagggccagaacgacctggagctcattagcatcaccaatgagaactccatgttccgtgcccaagctcgttacctcgttgagcgtgccgatcctgagatctgggcctttgtcctcagcgagaacaatgaaggccggcgttctcttgtagaccaggtcatcgccaccgcggtccccgagtctaccgaacccgagaaggtatctgtcgccgtcaagtcgttccttgatgcggacctgcctggcgagctgattgagctgctagaaaagatcattctggagccctctcctttcagtgataacaccagcttgcagaacctcttgatgttgactgctgccaaggctgacaagggtcgtctgatggactacattcacaagctcaacgagttctccgccgatgagattgctgagatgtgtaccagcgttggtctgtacgaggaagcctttgaaatctacaagaaggtcaataactacctggccgccgtcaacgtgcttgtggagaacattgtcagcatcgaccgagctcaagagttcgctgagcgtgtcgagctgtccgacgtttggagcaaggttgccaaggctcaacttgatggtcttcgtgtgactgactcaattgagtcctacatccgtgccgaggacccgtctaattaccacgaggtgattgagattgcaacccatgcaggcaaggacgaggatctcgtcaagttccttcgcatggcgcgcaagaccctgcgtgaaccggctattgatactgctcttgctttctgctttgcccgtttggaccagcttgctgagctcgaggacttccttcgcactaccaatgtagcggatattgaagcctccggtgacaaggcttatgctgaaggcttccaccatgctgctaagattttcttcaccaacatctctaactgggctaagttggcgactaccttggttcacctggaggactatcaagctgcagtggagtgtgcccgcaaggccaacagcgtcaaggtctggaagcaggtcaacgaggcctgtgtcgagaagaaggaattccgtcttgcccagatttgcggtctcaacctgattgttcacgccgaagagctgcagagccttgttcgccagtacgaacgcaatggatacttcgacgaactgatcgctgtcttggaggcaggtcttggtctcgagcgggcccacatgggtatgttcaccgagcttggcattgctttgtccaagtaccacccagaccgtgtcatggagcacctgaagctcttctggtctcgcatcaacatccccaagatgatccgggcctccgaggaagccaatctctggccggagctggtgttcttgtattgtcactacgatgagtgggacaacgccgctctcgccatgatggagcgtgcagccgatgcctgggaacaccactcgttcaaggacattgttgtcaaggttgccaacctggagatctactaccgcgcgctgaacttctaccttcaggagcagccccttctgctcactgacttgcttcaggttctgaccgctcgtatcgacgttaaccgtgttgttcgtatcttccagagctctgacaatattcctctgatcaagcctttcctgctcaatgttcagtcccagaacaagcgggctgtcaacgacgccattaacgagcttctaattgaagaggaggaccacaagctgctcaaggactctgttgaccagaatgacaactttgatgctgtggctctcgcccagcgcctggagaagcatgacctcattttcttccgccagattgcggccaacatttaccgcaacaacaagcgctgggagaagtcgatcgcgctctccaagcaggacaagctctacaaagatgctattgagaccgccgctatctctgctaaggccgatgttgtagaggatcttctccgctacgtaagtttgctatgtctgtcattgctcgagactttactaattttaactagttcgtcgatattgggagccgcgaatgctacgttggcatgctttatgcctgctacgacctcatccgccccgatgtcatcatggagatctcatggcgcaagggtcttcatgacttcacaatgcccttcatgatcaacttcctctgcgaacagacccgatcgatcgagatgctcaagaaggacaacgaggagcgcaagaaccgggagaagacaactcgaacagaggaggacaacactcccatcttgcagggctcgcggctcatgctgacacagggccctcaatcaaacggcgccggtctcacaccccaggcaactgggtatcgtggattctagaaccgtgcaccgtttttgcttttgattctccgtttctcttgcatttgtaacatacagcggatgtgatgctttgaggttgcaaaaggaacgatttcatatgggggatggttacgccaagagcgtgccataggaggaactcatgacagcccattaatcttgctttttgatttttttttcttcgccgcatgtatttgacaagcttccgtttttcccatgcttttaacagtctgggccatggcccgatattcagtaatagcattgcgatttcccacgttattttattctcaccgcagtaccgtcagttattccctttcccccacagtcccgagcctgccaagcgtctgcccaggcggatccattcgagcttcagggtcttcggtgaggaatgtagcatcgccaagacacgatggcaaatcatctgcaactatgttcccccatgggattgaaggtgagtcttcctgcagatcactcactgccttgtcagcttttagctttgcccatggggtgcggtggtagattagtattggacggttgtatgagatgctgtaccgtccccactcttcttacacgtcggctcgaacaagtaagcataatccactccgtacttttctttttttaggctttgagttacctacggaactactgaggtatacaatgtaaaacacagggtttcacagttccgacgagcccagcctgccgaattccccctcggcccggacagatggaaacgctcaattccaccggcggagacttggcacctaacgcggggaagaatcttacagccagcaagggttactggtggaaagaagggagtagatccctccgtcggggatgcgatatcatgcagaagtgtaaccagaacagaccagggttgatcctgatgaatccatgccaacggcttggacaaacttccaaggtgggggctggtggtagaggagtgcctcgggcggtgggtttccgtcgggattgcgagtccatgcagaagtgtgaaggggttgacgccaatggctcgggggaaattccaggttggatgctgatagataagcgctgccagcggtgattgcccagctctcatctctaaagcggaagcttatcagccaagagaagagaagagcaagggtgttgcaagtttctctgggcactgcaagaataaggtagaccaaggtagatcaggtttgcatttctcctggcttatggtgccaacaatggaagagctcggggtgttcagagcacccttgacacggtgggaataccaatggcgttggcatgtcgcgttcttgcgtaagatccaccagatagtcgtacctgtcatactccgtacaagcgggagatcccccgggagtgccaagtggaatggttatgagattgaattcgggatgaggtgaggaggggcgcttaatagtggagaggagccgtaccggtcgtaccgacacaaatcaaatatcgtcataggattcataggatcccctatcggcccgccaatcctttttaaaatcgttttagtggacgcatgaccggttggagatttccaatcttttcaatggaaccctggaaccttggaaccttggaaatgtctggacatgagtcagatcgacccctcctatctaaccttcatacatggaggtcggtggtgaaattatgtcgatatcgactcggccacttctcccctaggagacagagaggggaccctgtgtccatcgaattggcccgatccacttctcgctctgcacatgtgtttgtcgagagttctccgagtctcctccggccttttccctcgtctagttcccgcgaatatccgtacagttgggagttgaaggatcaagggcttcgtgttgttccctagatgctgacgttgatcccgatggcccgaggtagattggcggaataagttacctaaactacccgaagttatcgtgcgaggattatgagttatcgtgcgagaggaatcgtccggggtaagttgggaatgggaatgggaataataggaacattggttgtagctagggttagtatagttcctttatgggtatagatggtaagccccgcatagatttcgttatgcttttagcaaattacatttctcgaattggatatattcgattattgggttatcctattcttattatcctattattatcctattcgatttgatcattcccaatttctaggcattggtcccggtgtaccggtgaacctgtatgtacttgttacctcattcctggagtcaatcctcgcgtctcggcaagtacctgtgacttggtagatcacacttctgattcccctctttatctaacccccctcccacctcccaaccttcttgtcctctctttttcttcccccccttgtctttctatttcaccctttaaatactatcctatccaatttctatacagcttccattgcttatactgaagcacagtgcgagcgattgtgcagtgatctgccgaaaccggcctcaaattggacggagagctcccccagcttcttatagtgagtcaccgcctctgctttccataccggacctccggaggaagctctagagtcgaacctcacctaattcactcctttcaagtaaacaaacccttgtaaccgatctctcatctcgtcacatacattcacaatggctgccccgctccgccagacggataaggcggttgatgagtccgacatcctcgaggatcacaatgagcaccaccaggactcagtccaccgtcgtctgcgggccaactcgactattatgcacttcaaaaagattctggtcgccaaccgtggtgaaattcccatccgtatcttccgtaccgcacacgaactgtccctgcagacggtcgcagtcttctcacacgaagatcgtctctcaatgcatcgccaaaaggccgatgaggcttacatgatcggccaccgaggccaatatacccccgtgggggcttatctggccggcgatgagatcatcaagatcgccctggagcacggcgtccagctgatccaccccggttacggtttcctttcagagaacgcagactttgcccggagcgtcgagaaagctggcattgtgttcgtcggccctaccgctgaaacgattgatgcccttggcgacaaggtttctgcccgcagcgccgctatcaagtgcaatgtccccgttgtcccgggaacccctggtcccgttgagcgctttgaagaggtcaagaccttcactgataaatttggcttccccatcattattaaggctgcctttggtggtggtggtcgtggtatgcgtgttgttcgtgatcagtccgagctgagtgacgctttcgagcgtgctacctccgaggcccgcaccgccttcggtaacggtaccgtcttcgtcgagcgtttccttgaccagcctaagcacatcgaggttcagcttctcggtgataaccagggcaatgttgtccacctcttcgagcgtgattgctccgtccagcgtcgccaccagaaggtcgttgagattgctcctgccaaggaccttccgaccgatgttcgtgatagaatcttgtctgatgccgtgaaactggccaagtcagttcggtaccgcaacgctggtaccgctgagttccttgtctgtggcaatgagcactacttcatcgagatcaaccccagaattcaagtcgagcacactattaccgaggaaatcaccggtatcgatcttgtggccgcgcagatccagattgctgcgggtgcaacccttgaacaacttggacttacccaggaccgcatctctacccgtggtttcgccattcagtgccgtatcactactgaggaccccgccaagggcttctcccccgacaccggtaagatcgaggtttaccgctctgctggtggtaacggagtccgtttggacggtggtaacggcttcgctggtgccattattagccctcactacgactctatgctggtcaagtgcacttgccgtggctcaacctacgagattgtccgccgcaagatgctgcgtgctttggttgagttccgtatccgcggtgtcaagaccaacattcctttcctggcttcgctgctgagtcaccccacattcatcgatggtacttgctggactacgttcatcgatgacacccccgagctgtttaccctcgttggcagccagaaccgtgcccagaagctgctcgcttacttgggtgacgttgctgtcaacggtagcagcatcaagggccagatcggtgagcccaaattcaagggcgagatcatcaggcccgttctcacggatgctgcgggcaagcccattgacatctccaccccctgcactgagggctggaagcagatcttggacaaggaaggccctgcgggcttcgctcgcgccgtgcgcgctaacaagggctgcttgatcatggacaccacctggcgtgatgcccaccagtcgttgcttgccacccgtgtgcgaacaattgatatgctgaacatcgctgctgagaccagctacgcattgagcaacgcttactcgctcgagtgctggggtggagccaccttcgatgtggctatgcgcttcctctatgaagatccttgggacagacttcgcaagatgcgcaaggccgtccccaacatccccttccagatgttgctgcgtggcgccaacggtgttgcctactcttcccttcctgataacgctatctaccacttctgtaagcaggcgaagaagtatggtgtcgatatcttccgtgtcttcgatgccctgaacgatattgaccagctcgaggtcggtattaaggccgtccacgaagccggtggtgtcgttgaggccaccatgtgttacagtggtgacatgctgaaccccaagaagaagtacagcttgaagtactacctggatttggtggacaagatcgtcaagatgggtcctcacgttcttggaatcaaggatatggctggtgtgcttaagccccaggccgcccgtctgctgatcggttccatccgcgagcgctaccccgatctccccatccacgtccacacccacgactctgccggaaccggtgtcgcctccatgattgcctgtgccgaggccggtgctgatgccgtggatgccgctaccgacagtctgtctggtatgacctcgcagcccagcattggtgctcttcttgcttcgctgcagggtacccagtacgaccccaagttggatttgtcccacgtccgcgctctggacagctactgggctcagcttcgtctgctctactctcccttcgaggccggtctgaccggccctnnnnnnnnnnnnnnnnnnnnnnnnnnnnnnnnnnnnnnnnnnnnnnnnnnnnnnnnnnnnnnnnnnnnnnnnnnnnnnnnnnnnnnnnnnnnnnnnnnnnnnnnnnnnnnnnnnnnnnnnnnnnnnnnnnnnnnnnnnnnnnnnnnnnnnnnnnnnnnnnnnnnnnnnnnnnnnnnnnnnnnnnnnnnnnnnnnnnnnnnnnnnnnnnnnnnnnnnnnnnnnnnnnnccgctgaccccgaggtctatgagcacgagatccccggtggtcagttgaccaacctgatcttccaggccagccagttgggtctcggacagcagtgggctgagaccaagaaggcgtatgaggttgctaacgagttgctgggcgacatcgtcaaggttaccccctcctccaaggtctgtggtgacttcgcctcctggatcgtcagcaacaagctgtccgcccaggatgtgctcgaccgtgctgatcaacttgacttccctgaatcagtcttggagttcttcgaaggtctgatgggccagccttacggcggcttccccgagcccctgcgtaccaaggccttgcgcggccgtcgcaagctcgacaagcgccccggtctctacttggaacccatcgacctcatcaagatcaagaacgatatccgcgagaagtacggcgcggccaccgagtgcgatgtcgccagttacgccatgtaccccaaggtgtttgaggattaccgcaagttcgtggccaagtatggtgatctgtccgttctgccgacgcgctacttccttgccaagcccgagatcggcgaggagttccatgtcgagctagagcaaggtaaagtcctgatcctcaagttgctcgccattggtcctctctccgagcagactggccagcgtgaggtcttctacgaggtcaacggtgaagtccgccaggtcagtgttgatgacaacaacgcctcgatcgagaacctcgcccgcgccaaggccgaccccacggatagcagccaggttggcgctcccatgagcggtgtcgtggttgagatccgcatcaccgatggccacgaggccaagaagggtgatcctattgcggtgctgagcgccatgaagatggtatgttgttatttcttttctattacatataatttgtggctaactcccctctaggaaatggtaatctccgccccgcacagcggaaaggtgtccaacctccaggtcaaggagggcgactccgttgatggccaggacctgatctgcaagatcagcaaggcgtaaaagcatagcgactctgtactacgaaccatgcacaatttgtgatgcgtggtgtgatttgaatgttttctcagcgtctttagtttatgtttttcgagttcatatctgaatttaggtttattcggaatcaaacagtatttctgttcaaccatttgaaagttcttagtacattcacttgtaggtctattcccacgcttctccccattctcccgtctttctcccgagaacggctttgaaaaattcgtcaatttacggctcaggttgataactatacatttctttggtataaatcttcttgtttctctgtgctggatataataggcagcaggatagagcactcagagcactgttctagccacctgtacggtcataagtacttatctatctatctaggaaattaataccccggccatcgtgcgggtcaatttctccccactataagaacgtcggcacatccacatctataccccaactaccccaaatcaaccatcaacagaacataatcgaaatacaagatggaaaccatccgccgtacttatatcaaatccctcgctcatcgcggcataatccaaggcgtaacaatttcgacattgtcttctcccagccaagccaaagacctctgccgctacttcggcggtgtccgctacggccttgcccccgccgagcgctggcgccgtgcccagcccctacccgcatctttcacctacggcagcgaagaagcgccaggccaatgtgatgggggtgcagggctttgtcctcaaccaggttttttgaatatctcgcctgagaatccggatgcgtggaacgaggattgctttcagtgtaatgtttggacgcccattggagaggcgcctgaggggggatggcctgtttttgtttttattcgtgagtatcttctgatcagacataggatatatagtttcagacttggaatagggcaacaggcttctataaagatcgtgctgactggtgttgtccgacgcagatggcggatggcttcaattcggctcgcctaattcattcaatgtggctgcattgatcggcgaggccgacttcgactgtgtggttgtgatgcctgcgtaccgggtcaacttattcggattcctctactcagcagaattggaggaggatgcagctactgtcggagagacagttgggaaccacggattctgggatcagagattagcattagagtggacgaaggagaatatccagctcttcggcggcaatccggatctcatcacgatctcaggatattccgcaggcgccaactccgtcttccaccaactagcctatgacctccgccaaccagacgagaattctctcatccgccaagcctgcatctggtcaaacagcccagccgtccagccaaagcagccaaccgaaacacaaacccaattcaaccaactcctaacagccctggacatccccctcactctgccacatagcgagaaacttacccgcctacgctcaatccccgcaaaaatcctcctcgacaaagcaagaacaatccagctccaccaattccgcccaacaacagacacatccttcatctccccgtccctcttcacgaccctcgacaacggcgccttcgcccgcagcctcctagcccgcaacatccgcatcataataggtgaatgtcgcgacgagcgcttcctttacagcacatggttcccgccgacagacaacacgctctccgcgctgcgcacccgtctcgtggcagattaccccgaacacatcgtcgacgccgtcatcccgatatattacccggacggctgtctaccgacgaactgcaagaactgggaccaggacgcgtgggggaggatctacgctgatatgcaggtgcatcagatgcagcgtgggcttgtgtatgcgctgacggcgaatgaggccggggttgatgcttcggcgttgctgtttcggtatcggattgagtggcgggcgaagtgtgtagagaagactttgccggttgagtggggggttacgcattcgtcggattatccgatttggttctttgggaatggtgggttgttggaggaggaggagaagagggttgtcagggaagggcttgttgggccgctagaaaggtttgcttgtggggagaaggaattcggatggggggtttctgggaccaagggcgttaggacgttgaggggggatgggagtgttaagattgtggaggatgcggattgggaggagggtgttagggtttggaagggtttgagagatgctgatgagaggttggtgtgatacctacaggtacatagttacatacgtagttatgaggtgcaagtatagacgccacggaggatataccggataccctaaatataggtagcttcgaccttgatatctttcaaactatatgccaagctttccccgcattccaactacgtcaaggctctccggggtacatcatagcttatcagtctattacaaagcacagtacatggcgtagtgaaatacctgtagtgcatggccatacccaatagtacaggtactggatataataagtaccagtcttgaccttggtaacggaactagaccagtccaaattcaatcagcagacggtgattcaccacctgtaacgtagtaagctgagtatgctcttataggccatcttcccccctctggccttggattatctcttcctactcagtttaattaattcaagctaatctgcgagaacattgaggtatgttccattttaattctcacctattctatatcccatctatccccaaagggcaacctgaacaagaatgacgtcgtcgattcccaacccttaagagacatcatgattagtatttccttggtttctttagaattccatgctctcactcttactatactaaattcccccagaagaactacaaaccattacggactataccagctgtctagacatctccaacatgtctgacgacacccgccgcaactggcacggaagccccggtgaccgtctcgagcactctaatgtctggatgagtggcggtgccaagagccctaccggtcgtgctgcgtgggcgatgcctataacgaacaataggagggtatgtcatttgcctcttgtggatttctattatatatcgtccattccccttagcactacatcatctatccatccataacacatctccaaaaccaacctaacatccaaaatgaaggactccgacacatccacatccacctcgaacggaaaaccagccgaaggagatacacctaaccccccaggcttaggtgagcgtcgccgcagctcggccggctccaacggcctcttctcgaatctgcacacacagaagcgtgaatctacaaacgcggacatggctatccgccgcgcgagctggaatgaacaggctgctaagggaggcatgttctcgaagtggtgggagggatacactcggggcacttgaagcaattgtttttgaacttggatcttttgcgtgggcatttgtatactcgatatcgggggttggttctggagatgagaaaaaaaaagaaaaaaagaggaatactggtattgggttttgatttagttcggtgcttgtaggcgtgtgaatttcatgatcactcttaattgtttctttgattttctttgatccaggctctccttgtgtctttctctacaaggagatactcgacgtacctgagactgctcctttaaatgtaaggtactgcatctgatccaacactgtcttttctacctctaatccatgaccggcacttgaaataaaacgactgctattgctaattcgagacatacatttacaagcctaacataacatccagcagagtatgacagagtcctcataaatggaaccaacaactactctggctgcaaatatgaacacggatttcacatcattggactgggagctccaaagcccaatttggcaatacctcatcccatggttgtctcccaacctttctcaatcataacatcaacccaataggtatcatcgtccccagcatccaacctcctccatacttcattaaccaacttcaagcatatatgaatcggttttggcggcagaacgtgcaagaaggaggtcaaacggccaaggatgaacttgcgcgtgcgcgagacttcaatggcctccattgagatggtaggtgcctgattcgggttgtgactatctttatccctgccctctggataatcttcgccattccgggcttgagtgccagcatttgtggccagacgcgggagacggagctctgagcaggacgccaccaggagaaatggctggaggcagcgggtacgtgattccaggggtatggtttttaatcgggagagggttgtcacggcgaactcggtgagccagttgctatataggatttcgggggtcggagattgttgggtatctggtgatgacggagatggtagattgtgagaggaagatcttcgagacggcgaagcagcggtacgttgagacttggtgttttgtcctgttgctggactaggacccccgaatctagctgacaggtccatgctgtcgaggtcaatggggaagaatgggtcgcgggatgctgcatcggcgttgtcagggtattgggatgttgtggatattggggtgggcaggcgtttgtgcagtaggtctgggaatacgcggtataactgcatgagaccgacgcatcgatatgcttcggccattgtcaggaggtgccatactggggtatcgtcgtcaccaggactgacaatctcggcctccgagggatgagcgaggcctaggaggcgttcttctagcttgcgggctttctcgattgccaactgggcacgggtgatatcatcttgggaggtgaatcgccttgagcggatgcgttttcgctcacggcggatgagttgcccgacctcgtgcacggtgaactgggtgtcgcgcgcgatgccggtccatgggtgcgggacccgttgtagaacgaaggactcgccaatagacgaagcggtccgtgaattgttagataggaccatcgtgtcattgtctgcgacgaaggaaagcagcatctcccagtagatgagagcttcctcgaagaaccggtaattattgctgtcgttcttaggtaagctgaagctggagccgttcgatggtgaagagatggtattgagctgcttgcggagcaggttgaaaaatgatatacccaagtcatttgggtcgtgccaactagccgtttgtccgagcattagcagcgccagcaaagacttgtcgtctatcactgcttcgcgcgtgattatatcaacagcttcatcacgcatccttcggcccatgggaccgaactgaggaaattcggtgaccagtgttgcagcagccatgctttgcattgttcgacacattgccagtgaagatccccaaagacgggataccgtggttcggaaggggttcatctggctgtcgtaactagagaacagtcctgccacttctttgaaatagtactcgatcaaagtccatgatggattattcagtggacgagatatggacatgaagttatgtgatgaggggcgatgcgatgcaggaggataactgcgcacaatggtcgaaggtgagaagtcgcggtaaacatcattctgttcctcactttgcgttggcccaatacgcgacagaaagtgtgacaggtctacaccgatattttctgacacttcaaagtcacggaaagtgtctctttggtgtgtgaaagacggcgatgccggcatcggggacggtgagcatagatccgtcagttcgggtaaagacccatggctcggatgttcccatagattgtcacatagagaagttcggctatctaagacgaaatttggaggatccggttcatgcgtctcaaatgttgaatcctccggcaaagcatcgtcgatttgggttaccggctggctaggaccaggcgaggcagaagccgcaggacttggtgttctcacctccgagatcgatgcgggtacggtgggactagactgctcatacttggtaacccagcgcagggattgtgcataaccaggacaccggacgcccaagcgagtgcagcgagtgcagtgaggtttctcttcgccgcatttgacctttgcatgttagtgatatccgaacgggcggggacgggaaacacaaacccgtttactcttgcatcttgcacagccatttctagatttcttaacgcggcgcattataaagcataaagaggatgaatctgaggagatccggcaacattcaagatgcggagtataggctgagggggaaaatcgttgagaatcggggcttatctcgataaacgggattcttttgcccctttgggcaggtgaaacaagagaaatgacgatgtctgatttgatgactgtataccatatggaagactacgcgaggcatctacatagtacaagtgtacggagtagtaaaatcataaaacaaacgtctatactctttactattgttttgaccttccaaggggtgggaaaattcatgatgactcagccacggcgtttgaggtcggaggcttggtgcttggcaattgatatctacacctggacaagactcgatcatggcatatatagtgcgcagcaaggtaagtataagtccaaatgagcattcaagaagtctaacattaacataggtaaccacagtaccttttcaaagacttgcgactttcaaaccagtggtgatcctggctaacggcctgatatcaaccccgagtctccatacaaatcccactggaaggcctcaattgcagagtaattcctgcagaagtaactatgctcgcgaatttcactcaactcccatcacaatgtcaagcaactccgaactcaagcagactttgacaccaagcctccttgatgacgtgcacaagttgtggttcaatcacctgagctgcgaagaggccctcatcctacccggatggagcgagatggggaagtggttctctcgtgacgaggcttttgataaggcctgcgtgtaagtgaccatttgccctacttgaaccccatagaagattaacgagctcaaacagcacccaattctgccctgccctagaaacaatcgttggctccagagcatcagcttcggacattctatctgaagtcagcctgtcctcgccgatggattggctcagcatcattcttctacttgatcagattccccgcaattgctaccggggagcagagtcgaagctagtgtttgggcgctttgacccattagccgaggagattgtccttcgagcaattgaggaagaggtaccgatccgatcgccgtatctcaggtaccacatggcttaccgtatttggttccatatgccccttatgcattcggaaaacttggctatgcatgagctagccgtcaaggtgcacgaggatatagccagagatgtcaataagcttctggccagggacgcatcggctcttacggaagaggaaagaaaatgtcgtagcattctatccgagaagagagaggcactacaggcattcttgagcaatgctcttgattttgagaagagacataaagtgatcatcgagcggtttggacgatacccgcatcggaatcaggcactgggaagagtgtctaccccggaggaaatcgaatacttaaacaatggcggggagacatttgcgtgaagccaaaccgagtttgtatatattcacgaatacgcacataatagtaatatgatacagtattgagctacgggggagccagtctccgcagacaaaagcgtcgaattattatttcgcaatagaaattggccaccctacattccaatgaacgatttggaattccgtcccaaagcagtaaatgagcacctgccctttcaccctttcaccccttggtagctcgcctgacccctttcctattcgagcagaggccacatacctttcttattcgggtgttgttgaagtgtacataaacaaacaattgaacatcaagccggtttcagatagtgaaacaatgaccagaataccgcatctgttacagagatgaagttgctctttctcatctggatcagtaacaggccttgctaacactaaacgcacaattcaaaatcatagttcgaccatcattactataagtgctgtctgatagaactgaacgtggattcaagaaaggtgaactggaggcaacaatgggaattttggtcttcccagctctatctcattcatcatgattataccacgccaatcttctatcaggccgttcattgtctcgctgctggttgtctcagtgatatcctctaaagtgcttcatcttctccaacatgcgttttctcttcccggcggtcaattcgcaatctacttcccgacattcttcatccttgagacacttttatgcgtggctgcgtgggagttgctattcaaatttacggggttgaagtcacttttgggcactgcagtgacagtggccataacgtaagtacttctctgcttctaggtagaattcaatgagactgatatactgactgctacagggctctgagcttcgtcttgtcttcatctcaaattgggttctatcttgtaactggcagtgagatccgttgggatgcagccacagccgttggaactgatccagaagggagaaagctgatgctgagcgggctgagatcctttttgggagccgcatgcgcccttcttgtgatttcatggctactcaaatattggatatatgttctcataggccattggatgtctgcactatttagcgcacaaactgaaaaggcagacgaagaaggcatcgtgaccagccctcaaagaaagtcgcggacagcacgattcattcaattttggacagtatgcgccgcggtattcattggattcttgcgcttggctcggccccaggtaccttataaccatatgtctgagactatcccattcagctttttctgggctttgggttcgaggcctgctgagctgcatcggactggagatcaatcatttccgctcgcagacctgattgatgagccatactgggaaggtccatacgatcacttcaagggttgggccccgggaaagccagactccagcgcgaaaaagagtcgacccgtatgggcgtctggggagttaccaccagggttcgaccggtggggtgaaggagagtccggcgatgaaggagggggcgttactcttaatgagaacggggcttctcagaagaatatttatcgtcccacggatgaccctctccgaatcaccaacctcaatcgtgaaatgcttgagcccatagctcaggttctcaagaaatatcaagttcccatcacacatgtcgtacttgtgttgatggaaagtgctcggaaggacatatttcccttcaaggcaggctcacatctgcacgagatgattctatcgtcctataatacccaagaccccgaagtactccaagaggtcaacgacaaattatcaactttgacaccaaacgcagagaagttgaccggtgaaacgagtggactttcgacaagtaacaacatttccagcccctctagtggatggaatggtacgacggaaccaggaatgggcggtatcaatgttaacggtgtcctcactggtagcagtctatcgttcaaaagtgcagtcatgaactactgcggcgcgggccctctgccggtgaacttcatggaggaggtcaacgccaaaaactatcagccgtgcattatgcagatttttgaattgttcaaccaacttaaaaagaactcgactgagaagggcaagcctcgaaatgggtttgagcacattcatgatcgaaactggagcactgtcttcttgcagtcgatcacaggactgtatgacgagcaagatgagctcaacaagcagatggggttccaaaaatacatctatcgcgaagatattggccagcaaagtgccaaatattatcacgaagacatggaggagatcaattactttgggtaagtattctcccaccgactgagcatctacattcacattgctaatacgttacctagatacccggagtacgagatatacccatacctgcgagatgtggtgaacaatacaatcgagaacaacgaacgactttttctatctcatttcacgagcacaacccatcacccatggggcacgcccacagcataccacgaagaggaatactttgccggagacagtctcatggcgaagcacgaggacatcaacaaatatctgaatacggtccgatacgtggacacatggcttggcgatatgatgaaggtcctcgacgaagccgggattgcaaacgagacattagtggtattcgtgggagatcagtatgttgcgccagcttcagtaacttcgcacaacaaccaaatagccatgtactaatcccaaacagtggccaggcgttccccgaagatgcgccagtctctggtacatacgagaacggacatatcagcaatttccgaattccactcgttttccgacacccgctgttgcccgcattgcaaatcactgcgaatgcaacctcgatgtccgtcgtcccgaccattatcgatctactcgtgcactcgggctcgttgaacgagatggattccaatgcggctttagacctaataaatgaatacgaaggacagtcattgatacgcccataccaagctactcacaatggccgacaggcatggaacttcggcattgtcaaccccggtggtacaatgctcagtgttgggtctgcggcagtcccgtatcgactcatattgccgcttgctgaggactttgagtacattttttctgatctagataccgacccggatgagttaagtccattgcgtgggtggtcccttggggagttgatcggccgtgtacaaaggaagcatggagacaaagccgggaagtggctggtagacgcggagaaagtggggaaatggtggattgaggagcagaaaagactgtggaattaccaataataatgcaaataaatctgccattcaagaccctaggagaacagagaagaataggaggagaagcgggttgccttgatattgttcggtttctttgtttgcgcctgaggcagacacatccgccccacctccacttcatgttttatattcgttgcatttcgcgttcggtcttttatttggactattatcttttcaacagcttgattgatcgagattgcacccttagctctcggcagcgcagagccttaagtctggagacctaacccggactcatcctgtgcatctggcccctgtacccccactatttgattgcatcccaacaattattcttccactcagaaagtttctcactgcaatctccaacaaatcatggagggaaaatattcgaccgatcccgagtgggcatctgtcaccccaattgacctggacgatggttcgagctcgggtgccatgccactggcgaccatcgcctacccaaccgagtacctcgaggcgacctcgtatttgcgtgctgtgatggccgcgaacgagatgtctgagcgggcattgaacttgactaaagatgtgatttcgatgaatccagcgcattacaccgtatggtaagttggctagtaacagccttgggacatgccaatatcgacgtctgacattctatacaggatctaccgagcaaagattctctttgctttggaaaaggatctagatgaagaattgagctggttgaacgatgtttcattgaagtacctcaaaaattatcaaatttggtatgtcgacaccaccaacaacagaggagccgaaagaaaaagccaggaaaatataaataccaaaaacaaacctaacatctcaaacaggcaccaccgccaagttctgctatcatcaaaagcacacttcccaaccttcccacccaaagaagcagacttcctaatggagatgttcgcccaagactccaaaaactaccacgtatggacctaccgtcactggctcgtgcggcacttcggactatgggaccaaccgcgcgaactcgaagacgtggaattcctcttgaaagctgacgtgcgcaacaactccgcctggaaccaccggtacatgctccgtttcggaccacgggacacatcggtcccagacgcggggatggtgaacgcgggtgatctttcgactgcgccggccgataagggcaggctgtctgttgtcgatgaggacttggttgatggcgagctgaagtttgcgcaggaggctatcctgcgcgccccggagaaccggagtccgtggtggtatgcgcgcggtgtgctgcgggctgctgggcgtggattaggggagtgggaggggtttgctggtggatttgtttcggagggggccgttaagagttcgcatgctgttgagtggctggcggatgtttttgctgaggctgggggggaggaaaaggctgtgaggatgttgacgatgttgaaagaagagtttgatcctattcggaagaattattgggactatcgcattaggaagctggatcaggctgtggtttgatttgaagaaagacactacgccttgtgctgaacaacttttgtcggataatttatatctgtttatgtacctttcattgaaaaatcgtacgtctaaagctgattctgcttcgaattaaaagactgctggatacactgtatgattacatgaacgatgcgaaagtctagacctttatctagacggtaattaaaatgtccaagtgtagtgctgcaaatcaaacgccaaaaaacaagtcaaaaaaagtatcgaaaaatgaaatatatccatcatcgaaattcaagcccatccctcatccaacatcttgcgccattcactagccatatcgatagtgacgttgctaccgccgcagacaatgatgacaattctactccgcgagttgagatcaggaacaagttgcttaagcttcgaattcagtttctcgccgacttctggctcaggctcctggtctgtctcattgtccgtcgaggtcgaccgatcatccccatagccctcatcgcggtaagtaatatcagtctcatccaagcccctcttccacttcgatgtaggaacagcagtagcagcatcgccgatggccgcttcgatacagacaccgcacgcaagctcgacgaggagtcgttcatcgttggcgaggcggagcacgccgcgggcggcgtctgcatctgagagcacggcgctgtgcaccttgatgcctgggggcggggacacggcgtactggaaagttgtttccgagacgcggacagcaccgagagaagtggcctgggatgtgatctttgggagggagatgagggatttattggcgatggctgctgccagtgaatcggtaccggccgtttcaatggcgaggagatgaatggggtttggtgtgggtgaggaatatgaggtaatttgcttcttctgtcgtcgcttttcgatgcccatgacgagtccattgagaaggccgccaccgccgacgctgcagaggatggcgtctaaagggagggcccggtcattgtaggcttttttgtcttcgggggtggtggcgggaggaagctgggtctcgagctcgtcgatgatggtgccgtttccttcccagataggctggttgtcgaaggggtggagggcgattttgatcacatcctggtcattcccgctgcttgtcttcatgatagtttcccgcatgtattctcctgcttctgaaaatgtctcgccatgccggatgacgtctgctgcacctgccgcccggatcttgtcaagcatcaagggatttgtgcccatgggaaccacgacagtgcatgggtagcccaggctccgggctgcacagacggctgccagtccggcgtttcctccggacgaggcgtagaaatggactctgcggcccacgttctctgggttgcgaaggtgagaaaggatttggttgcccatagcacgggacttgaaggagccacttggctgcacgttctctaactttaagaagatcctacaaccagctgctcgagaaaggcatgcagactcgaccagtggtgtctcaatccatggcgtcttgaactgcagctgaccataggcggaaatgtcgatgctccccattttgatgtgttgaacaaatggaaaaagaaaaaaaaaggttaccggagcaattccaagaccagaagtatagagatgatgttccccaaatagtatattgttgagtcgagtggttacacgacggtaggttgtaaattcacgaaaatagagatagggagatatcgggaagaaaagaagagcgataaatactgaaacttccaaactccaatatgcagatatgaagatatgaagacatgttttgatatacaagtgagcctcaagggccagtacaaaagctttccgacgggaaactagagtttcccgtctgataggactgatcggagtatccggttctggcccagcctttcccgtcgatagccatgtgggtcgttcatgacgaccatgacataccgtctgtttagaatggccgggcgtgggaaacctggcgtctcagctttcgaggtgtggaggagggggggaaaacctcatctggtctgccgcatccgagcggagaagatgtatatctttattcagacgggcgtctcggccgcccatgattggccgccgatcgattcctcttatcaaatcgaaagctcaaaaacaggcggattactcctcagtgagcaaaggagggaaaataatacctttcttaacgccctcgccgtaatctgaatccgaaccgtacgccgtggccgcgaatgcccgcttggaggggtccgaggtgtttacacggagcaattctagaaggtcatgagacttgccgggcatgaacggttgcaataaaatgccagcgatccgcagcgattccgccacgttgtagatgatccgttgagggttgggagttttccacggttccgacgcatggaagtacttgttagtctacaagcaggtcaatactcgccgaatccatgcggggatgatcacctcttaccttctcaataatgctcataatttcgtgcagcgcggcacgtgggtttagattctccataagctcggcaacctggggaggcgtctgggccaacatttcctgatgttccaagtcctcaggggtagcagctggaagtttacccgatcgggcgtccataatgtacgagcgcaaattgccacgcgcacatccgattgtacgcagagcaaggtttccgagtcccccctgaagcaatttcttgtaatctcggatgatgaaggaattgtcaaagtccgcatcatcggcgaggccaccccggtacgctaggaagaatcgcatgccatcgactccaaaccgttcaatggcgaaaaatgggttgacaacattgcctgtggacttggacattttttcacgattcatcgtccagtgtccgtgcaccaagacgttccgaggcagaggaagatcaagtgccatgaggaaagcaggccaataagcacaatggaacctgccaatcgattaactctgcacccggttctccagctgaactcatgaactcaccgaacaatatctttgccaactacatgcaagtctgcaggccatacggatgtgttgtcttttccaggtgggaaaggatatccagctttggtcaagtagttgaccagcgcatctagccacacgtagattgtctgcgtgtcatcgccgggaacacggatgccccaagtcagacgttccacgggccgagaaatcgagagatcctgcagtcccgactcaactccgttgatcacagcagctgtataggaggtaggggtgataaacggatcttctcttttgtacaagtcaagtagacgatccttgaaggctgagagacggaagtggtagttggtttctgaggaccactctacctctttacccgtttctattgagacctgtgtggtgttagtattctttctctttgaaaaactgataaattacataccatgcgcttcctccctgttgatggatccagggagttctgcacttgcgtctgtgggtagaatgtctcatcgctgaccgagtaccaaccttcatgcttcgaggtgtagatatagccccgatgttgcagcatttcctactaattatcagcgtgccctactatgaacggagcatagtaacttacccagaaatattggacggcatctcgatgcgccgggtcggtggtcctgatgaaatgatcgttgtcgatgtttgcagccttcgctagggcctatatcacaaattgagttggagatactcttgaatatagcaaaggggactcgtacctcaaaggtccggcagttcatatcgcaaaatgcctgggtatccatgcccgcttgaatggcagcttgttggatctgcgatgaatgtcaacgcccattatcgaactgcaatcccatctgtatgtaataccttcattccatgctcatcggttccggtcaatagttgagcatccgtgttcccgagtaagacctgccaccgtttcatgatatcggcgatcaccattgtgtataaatggccgacgtgaggggctgtaaggaaaacatattgttagaaaatcagtttatacatggtattcactacggtgctcaccggcgttcacgtagaaaattggcgttgttacgtagtaaggcttggacctttgcggcgtagttgcaactccgcgccggggggttgttgcccatccatgcttgcaagatatacagttccacggatttcttgatctcagaagctgagacgctctgaataacgagcgaagtgacgtccttgctgcagccattgggatattgataacggcaagaagagcatgacatgttattccgcacatctcgggtggtccaagcttctccgcaagtcacggccttttttttgcgcctacatcatcgcgcttacatcgtcatcgagaacacccacgaccttatcgtcgataagtatatattattcatttctctcatttaaaacattgtttgaagcatacctctacatcttcttgtatcacgcacaattattcccgggttttctttggcgtgaaataccgatcgcgatggctacagcaagcgaggatacactgaccaaagtgtcgaccgagggtaagtctcaaattataagttaatttcatgccttgaactgacatttgcttgcttttgtgttcagctgcaaccgagttcattaagaccttctatccggctttgggatcaaaccgtgaatctctcagctcctactactccctcgagcctacaaccatcctgttcaatgggaatcgtgtcgcagatggcgctgctgtgcaggaaatctttaccaatcaaatgtcgccaacgtactacgaagtccaatcatacgactgccagatcatcaacaaagcataccccaccattttaccgggtggtggactgaagccacagtccgagatgggagtcaaagacatgtcatttctcattgtagtcagtggatttgtccgctatggcgagggtcgcgatcagccgcaacgcggattcagtgagacatttgtgctggtccccaatccatccgcagagagggcgaggggccgcaaggattggctcatcgaaagccagaacttccgccttgtggtttgaacaattattccaacgaatcatgaatcagcttcaagtcaagagactatgcatgtgatacagaagtgaaagacaactgagtcatacccacccaccaaagatgaattgctgagagatacacgatgcaaccaacgatccactgcttgagatttgcttcaaaactagagcgccagacgccagaagggaaggaaaatgatgatattacccctattattagggggattatggcttagccgatgtcttgcgcggtatgcggaggtttgctttgactctttcaagcagctcctcacgcgtcgcagcctcactcggtagaagccctctctgagataatcggtcagtgtacgattcacaagaatgtatgattatctgaacacagtcatgtccgaacaaatcactcaaacataccgctttaagccatcttcgcatctcatccattgtccagttttcagggtctagcttccattagcccatgttagatacctaataataattactcttaccaccggtgggatctgcttgtgcgggaaggacatcgctgcccaagatagtataggctgccactgcagtgaccattcctgcgaatcctacataggaagatagtggtcagaaaatgttgccaagtgccttgacttgagatcgtctaccgaggaatagattctatcgagtccagtattagatatctatcataaaagtatagacagacgtagtaccttagaatgcaatgctcggtccaaaggggtcggcatcttgaaaatgatgcggtgattatttgaggttcttgggttgatgcagaagtattgtttcttaatcgtcaaaagagaagaaataaagaagaaaagtatcacagggcacgtgcaaaagacaagtattcaagacgaatagatgtgaacagctcgtcaagacgtgggttgcaccgccacactaacgccaccactgctgccttggaactatacagttgcacctacttcaactacatatcttcgataactcccaagttcagttggtggcactttccatgaactaattaaatacgtaaatatagacttatgggtattgctcaggtagaaaatgaaatgtgagcctaacaactatcatcagcatcgcatatctatacccaccagtccagcatggttaccatcattcattttgaaaccccttgaacagtcgaattaataaacgacatggaagcagtcattttcctgtcttcggttacattcgttattgcggtgggagctgccatcaaacaagggtataattgatcaccattgcagtatcgagtcagacattgattccatttacagcatagccctttacagacgataccgagtccacctacatgtcacatcaaaaggcatgactcctccgcagagtgtggacctggagagattcgatactcaaggaagcacacccgttcagccgccgccgaaactgcatcaccattcacgattggagagcagaaattcaagatggccaggatatactgaccgacgaagtcaaccatcgcgaacaatggtggaccattttgcgtcatatcgcattcctgaggaagcagagacagggactgttcatcattacccgtattcgcattcgctgccccccaatcttccagccacatttatggccccagttgcacgagccacaacaccaccaccagccacttcagttaccccgcctgaggcaccaactgtagctcatggctgactaagcaagggcttttgcagcttaaagccctaatgtgatccgcacacattcaccttagaggctagtgtcgacagtgagctttctcttttgcaccttgcttcaaaacacccgcaaccgtcattatgcctgccgaagtctccgatatcaagcagttcattgagatctgccgccggaaggatgcctcctgtacgttacgctgcatcgatagacctccgagatgaggcctggggatgatcatcggtgctgactgtttacgcctctagccgcccgcatcaagaagaacggcaagaaccagcaaaccaagttcaaggtccgctgccaccgcaacctttacacccttgtcttgaaggactccgaaaaggccgacaagctcaagcagagtctgccccctggtacgtttcaatcgcattgttcctccgtctgagttattgaggtatcagaggatatacacttggaagacggctcttggatatagctctgaacctatgctgacgattttcctctgaacagccctcaaggtcgtcgatgtctccaagggcaccaagaagaccaactaaattcggtaaccatggaatgaacggagaatcggagtgcggcgtgattggttgttgatgcatgcaagaccaactgttggggggatacatgacacggccgtggtccctctgcgagccgacacggggaaaattccgtggcgtggaacatgaatcttacgtcgcaggagtttctttgcgcctttgaaaccggctgctgttattcaccggccaggcgactcgtattttctggacgcactcgaggaacacttttgtcggaggttctagtccctacaacccaatgaaaaaaaaacagttgaaatatcattactacatgggtttctcgttctcaatcgagatttcctaatccattattctcgtcatggatattctctcatctcggatcttgtctcccaaggcaacaagtagaccgtatggaatagatcggctgtccttgaaatttccagttattgactctacttcagtcgtgatctcgagttaaacaatctcagattgacattgtgaccacaattctttctttgctttgatggctcgactgagagcaatgacaatgcctatttttagggtgttgatactccgcacagccattggatctaaccatcgcgcctgcctgaattcagtacggcctaagaacactgccaaagtatctgccacaatggagtctgctactatagattctaccaggttcctataggatttaagtacttggaaatggggcagttgataaagcaggtaatgaggcagtttacgatgaagcaagatatgataggagagacttatttttgttcggggtttacatacaaattgtaggtacccgttgctgtctaccgcagaagcaggtgggcacctagcctaattaggaaggcggtactgaagtcgggatcaataccctatttttatccggcgttgggttctttgatatcggcctttctgggtctttgttcgagtctaattcatacctttgctagcacaataccgttgttgaggatcattatctctcagaacaggcgtctcgaaaggcctttgtggatttttttcttctaaaagtcaaagcaaggatggatgcccgaagcatgcctcggatctatataaatcatctcgagctcgtcaaaaatgaagctatcaacagcattagcatcgcatttttccgtgcctatatatcatatcttctccagaatcttattcgagttttaacacggctggcctcattcagacaacccagcgaaggtggaatcgaaaatatgtgccacaaaaagccactgatccctgctatgggaaaccttagcatgttcccagcagagattatcttcaatattctagatgaacttttggcgagctctcccagattgacacacgaaaacttccatgccattaaccagctgacgaaaacaaataggacactagaacaatacatcaaactcggatggatgggtagcaatgcgtcgaacagtttcaagcaaggcgtgaatactgtccagtggtactcaaacagcgataatgcaaataaggctttaaccctccagggcgtagaccctcaacgcatcatgcccatcgaaggtccccgcggccttggtcccgatctcatcaccggtatcattttggctgactgcacagattgttttgagtggttctccgaggttctgcctgctacccatatgagctgttgcaacgagggcggctggtcatttctttctctggcactgtacgctagagccgagaagctacttgatcttttcttcctctcgggctttcctttcgaaccgagggattttattatcggcagtgctaatgctatggggaaaggtccgtcaatccttgggcttgctgcctcatctagagatcatcagtctttctctaggctctttaggaaactgaaggaagtcttgaacgggcacggcttccagaggactcttagagatagactcacgggtaaggagcgagcggctattcgaagtgttgctcctcagtatttacagaagatgttgtatgaagctggcctggtcactatgcacccggctcttcgttatagtccatactactccggtaagcgcaccctgatgtactaatcttctcgttatatagggttgtatctccttcattacgcttaggacaacgttactgacattcgcataacatttctctacctatctctcagtgaatatttgttactgtcattgatcttgtcttattttgttaagtcaactactgatactgtcttggcattataccactttttacatttacattttcgggtgttaacatatccagcgtataataatcaatcagaactttagctcgagtatacctcattattgtgcattaccagatatatggaataagtagatatcagcccttttttctatctttagctaactagtacctaggtatttctgtagatcattactcttcaagccacggcactcagcacttcattcctatacatgttgcccttcgcgttgcttggcatgtcgcagaattccttggcatcaatcgggtcatacggtgagtagactgagagtcttaggaatattaggtactccgtacggagtactccgtggcagattctatatttccgtcggctcgcataccgaggctttccattcagaccaataaaataaaaaggctgagctcgatctatgattttccaccaacaggttcccataacaacacttcttagctcacaccaacccgtgccaattgacgtaattgtgcttgatactattccatgatcagaacggacctcctccaggaacatacgcccggctagattaatagatgaccagactaggacgatatctgagagggctatgtatataaaatatagctgttgaggtcaaatatatatatcatacacatacagaaatatccattcatttatttcccagaaagccagagcaaaatgacactttcaaagctatctacgctcctagcctctgcctctcttgttgcaggccacggctatgtctctagcatcgtagctgatggcaagaagtaagtcaatctaagaaacaaagtctccataccaataacaactaaccacattatcagctacactggctacatcgttgacaaatacccctacatggcagacccccctgacagtgtcggctgggcaacaacggcaaccgacctcggttttgaagacggcaccgaataccaagatccgaatataatctgccaccgaaacggagtcaacgcagctttgagcgccaccgtcaccgctggctccagtatcgatctccaatggacgacctggccagactcacatcacggtcctctgataacttacctcgcctcatgcaacggtgactgcagcacagtcgacaagacgacactaaagttcttcaagattgaagaagatggtctcatcgatggtgcaactcctcctggtacatgggctaccgatgatcttattgctgctggaggccagtggactgtgaagatcccccccactcttgctgcgggtaactatgtgatgcgccatgagattatcgctctgcactctgctggccagttgaatggcgctcagaactacccacagtgcttcaatttggaaatcactggcggtggaagtgatgtgccggatggcacgtttggtggggagttgtatatcaatactgatcctgggatcctgttcgatatttattctacgcttacttcgtatattatcccgggaccggctttgtatgcctgactcagggttataattaaacatcaggtggagggtgtttggagggatgtgagtttggatgctcattctatctagtgttattcaaatatcacgaaatgaatgaatgctatgtgataacacaactccaaaccaaccagagtccctataaaacattgataattcgaatctattctgttctctcataaggcaaagcgataaaccctcgcacattcgccccctcaagcgccgcatcaataccacttagactcaaatccatcttgcgcaactcaaactccccaaagaaattcggctcagcagaaaccctctcaaagccaagtccctcaaacaaagccaaacttctcaaattcgtctgtccaatcttgacattgagatactcaaacgataaccccttcgatgaccccagtgtcttaacaccagtccctaacttccgcacagtctcaacatcaacatcaccaccaccaacaaactcatccagaatagcaccctggttctgaataatataccgcataaacatgagtaatgcagcgcgcccaaacccgcatcgctggttgactttctcagcgatcatgagctcgagctcgccgattatccgcggcgggctgttgccctcctcgccgtcgtcgatgcgcagaaataggttgatatcgccgaccatagtagccggcgaatcactttcagtttgtagctctgtctggctaggggcatcgtcttcaatgcctgttgtgattgcccgacagacgataaaggttagcttgtcggcgtcttggcgccagctgcgttgcatcgagtattcttcttccagagttaggggctccgaggctgttgcttcttggatttccttggggtctgtgagaaaggtggccgatcatagctaggatcttattgatcttgtttgcttaccgggtctttcatccattcgtggtattggggtacatgccatgatgagtacgggactaaaagagcctttgaggagcagagggctattccgcggaagtcagaattagcttcttctgtttgtattatagtctcaatctgcaaatcttcggggaaagtatatatccaggtatgggcatagagcagcgtaccgatgttggcattgagcagcattgtggtggatgatgagaatataattctttgagtatggataattcagaatgactcaatatgtatgcactcttgcggaaaaactcgttgtctatcaatatctcgatggatataaagcggaggaagttagtgggatggatttctttccaaatgtgggtcttggcgcgtagagcccacccggggtgtatacgacaggcttatataaatgtatcagacgtgtagggtttgagaatgtaattatttcattagtaccattgattggtagctctatcagtttatttttgttcttcctgaccgttgaaaactccaaaccggaccacctcgacctctagcgtttcggtatcaaccagaattaactccccagtttcgctgaatttgggaagtgccaacagccgaacacgggctgtatcagaggaatcagcggcacccgtcatttcagtgtcgccatctaggcggggagggacgccaccttcaatcgtggtagtcttgaactgtggttgattgccagcgaaaaaaatatgaggacaggactcgatgacatatggctcctcggattggtatggatatgaccctaaagggtattgttagcataaatttctctgaaagattcaagtgtccaagcatacaaattgtgtccggcgcagtgggaacaccgcagcgccaacgaagcatagcttccatgattcgcatccgagcattcgaatctgtctccttttctgggctgctatcatcaccctcaatagggatataccgcagaacatcgtcaacattctgaccgctgcatccccatactcgccagccttccacgtcgccgtcccatgggttcgtgacactgtcgaaccagctcacctcaggcttttcatcccctctgacaggaggtgcggaatattctcttgcctgagggaacatagtacgatggatcccctgttgagggagagagaagttcgcaggatctttttcgcccggcatgagtgtgataggaatgctgggcaaaatctccgctagaaagttatcgagttctgtgataggcgcggcattgtatgcagagcagtcatagccatactttcttggctgggcttcctctgcctcagcatcgccgaagcttgtcaccgccacatcttcaattatgttggctccaattgaattacctgcgatgatcaagcgggagattttagatgagcccaaggaaggactgttttcggcgttccccgagaatcccgtgtagcccagaagataatccgtcaatagctccaaagcaagcgtgtcgcttgatgttcctgtgatttccaggccactaacgaaggcgattttgccgtgttcctttccagcaagtggagcattgcccccccatcgttgaagctgcggagccaaatccggaagcttgatatcaataacctcgaaatctccatccgcattttcagtgcccaaagccgcgataattgcacctgtcgccagctgtgtagactgcaggaattttccggtgagccgtaagcggccagactcatcttccatcataatttgggtcaaagaggggtctgaagggtcggtgtaggtgaggcggggagggggcgcagaagtgaagttctatgggttgtcagtggaagaagcagcagcaaggttagaaaacgaacctcttggttgagatcatccaaaatattcggcttcattggcaaatgcatatatacggtgccggccacccaacacagctcgccttgtcggacatcgaggactcggtcgacacgtcgcaccttctctccagcgatctaattcacaagcaggtgttaggaaattccatagccgagagcgcaaaatatttcctaagactgagtgctcttacaatgaggccatcccacgcatccgtcgcgacttgttcgacggcaggtttcaactttgcgagtcgcaaaaagtacatgtcgtcatattgctgctgatagtgtcgtcctgcgccagctggtaggtggaaggtataaccaggaccgtaataggagtgattgcggtaaattggctcttgttcctgttcctcctcgctatcgcagatagttagcgaaagctccccgaaacgtagcagcttggatgcagagtggattaagaggtattacctggggggacacaagaaagtgtaatcctcggcgtccggtaccatattttgcggaatgatgttgaggccttgtgtttcggggatggttgagatgaatcgtgatgcgaagaggtgtgtttgacgcgctcacgcgtctgttagcgcgttcaattacattaccgctttgggaatctagtgggtcgatgtaattttatatgggagtaatcggactgactcctggaatctgctattattcccattaacctgattcatcatactattcttttcgttttctagttttcacaaattccttaggctcaaaaaaacgaagtatgtattttgtacttcgtagcgacagatcacattaagccgacctcgggagttctctgtgctcgatgatacaggaaaagagtgtatacttactgagatgtacgattcacaaagcaccatatattgtacccaggagcacatatggagatcggctaacagatgcctcggtccgtgcatatcttagggcttccccgcatttctattcttcatatttgaacgtggaacatctatacactctccatatctaagaaagcatcgagacaagaccatctcttagatccacctacttctacctctgacaatctaccatagccatctctacaacccaaaaacaatgtctctccaaacaccactatgctctctcctcaagattcaacacccagtgctgctagctggcatggcccgcgcatctggagctccactagcagcagcggtctctaatgccggcggtctgggtacaatcggcggactaggctacacaccagctcaactatcagagatgctcacggagctcaaatcactcctccgggacccctctctccccttcggcgtagatctcgcccttccgcaggtcggaggttcagcgcgtgcaacaaaccacgactacacacacggccagctggacgagctaatcgaggtgaccatctcgcacggcgccaagctcttcgtctctgccgtcggcatcccgcccgcaaagaccatcaagcggctccacgaggccggaatcctgattatgaatatggttggcgcaccgaagcacgcccataaggcgttaaaggcgggggtcgatattgtatgtgcacagggcggcgaggggggcggtcataccggcgaagtgccgttctccgttctcgtacctgctattgtggatgttgctcggcagtataagagtccgctcactgggcaaccggcacttgtcgttgcagccggtggtatcaacgatggccgcagtctggcggcgtcgttgatgtttggtgctgcgggtgtttgggtgggcacgcggtttgtggcctccgaggagagcggcgctagtcgcttgcataaggaggctgttgttggggcgcaatttggcgagactaagcgcacgctggttgtcactggtcggcctttgcgcatgcttcctaatgattatattaaggaatgggaagcgcggcctgctgatattgccgcgctgacttccaagggtgttgtgcccatgatggatgatttggagaacgacaaggacaccgatatgccgtttctcatgggcgacgtctcggctagtgttaacgagattaaaccagccggaatcattgtgaaggaaatggttcagcaggccatcgaggtgctcaaagtcggaggctcatatatcacttccacagggtcatcgagtaagctatagatattaggtaaaagttaggatgcatcatatttgccaagatttttttcttgttatactatgacatgtacttgtacagaaaatatgaaaccaataagacttgaagaaaccaacgaggaagatggattatgccttggtaattaccgaggaatatcgcgagacagacaaaaaatagatggcaaagaacttctacattttcgaactcaacccgaatcttcagatctctgtaaacccaaggcaaacccaagacaaactgaagcatttgccttgggagaaaagtacgaagtccaagaccgaatgttcatggaggtagccaaagtcgcttcgatcaaaatcgacgtcaaataaattggaataatcttagaaaaccaagccattgactcccgcagtgttgccattcgctcgagcttgcaaaagattcgggggcggggtgggaccgaagacaggcttctccgagggttgttcgacccgggttgggggtggctcgagatcttcctcatcactgatatcctcctcgtcatcttcgtagtcatcgtcgtactcgctttcagtgccttcatcatcgccctctaaatgatcatcgccttccgctagagcaagtccttcgcctcgaccctgggcttgcatacgccgacaaagggcttctaggtggtggcacttccgtcgccaccgttcaagttcttcatgatttctggtccgttcctctgccatttccagaatattgcgattagtttgctcgtgcttccgattgagagtatgattctccttctctaggcgcttggttttcttggacatttcttccatctccttgcggaaggtaaggaaaagatcgttgctgttgttcaaagtgtcctcgacctggtggtcttcgtcagcgaccggggagtgagacgggttataggaacccttctgtacctgtttgaatttttccacatagatgttgagttggctgcgcagttcagcctcggtatgggagaaagtggaaacctgagaggtcaaagctcggcttcggttggcttcaacttcaccagcgcggcgctgctcctcaaatttggaagcgagactttgaatctcggagtccttgccacgtaggaggcccctgtaatgcaagtcgcgtgtgtcaaactgctcgctaatggtcttaagcttggcgcggagtctataggttccgattagcaaatgtgaagctcggagaaggagaggaactcaatcgtacgcttcatccaaatcgacatccaccttttcgctacgagggttccctttggcagccatgacgtcttgaatgtcgtaaaggagcgagtcgagacgttcgttcacaatcaagcgcgctttcttctcagtgtcctccagcttcttattctcatcctaccaaatcgtttagctggcaagtcctccgcggtgtttggcgcaatcgtctcgaggcgcatgctgatggacccaccttgacctttttgttctccttggtaagttctcgacacagcttctctagcttgtccttcattgtaacggtcttgttgagatcagacttgcccttatcctggtccttttgcaactgatcggcgcgcttcttgctcttagaataatcacgatccaacttcttcatatccgccaacagctcggtgtacttcttatggacggtttcgagtttggtcataggggattcgatattgctcaaaagctggttgagatcacgggttgctttcttgacctcgcgctctgtatatcaaaatccaagtcagtgacccttgttccagactaaccccgcagtccagcggtaccaagcaaagaagaaaaatgccgccgcagaatacaaagggagtcacgcaccaatttccgcctcttggtctttctcgccggcggcatcttgctccagctgggagatcttggcggctaaaagcttggacgtctcgtttggatcggccgctttcttcaccttgttcttctttgccatggaggtggacgacatttcaaggtatttgcgtgagtagtgcaaaaacagcgtatttggcgattcgattcacgagggggttggtacgaaggccggaagccgaaaatttgcgccgaataggcgggatacagggcaggatgtagacggatcaatcacacggaggagagatcccggaggcaaggctcacgagcgggatcactggccctaggatgtaaggatcgtttgcttgtcgtatcgttcgggaaagagcaaatgttggtcttcggagcagaacttcgacaagcgggcggccagagtgaggcttacgctagcatagatgatgtaagcctgggcggtggaacctccagggctggacattttcgactccggggttgttcttaacgatcgtcaactacccataattatgttgcgctcatcgatgcgcctcggtacagctcgagtgcccaagtctaatccgcttattagtcgttcattgaagtcaacgcaaacggtccttccacgcaatacccggagagccgcatcgacggtgaccaacttggataactttcccaaggtcggcgagaagctccacggattcactctacaggagaaaaaacatgttcccgagcttcatctgactgcagtctggctgaagcatgaccggaccgatgcggactacatgcatgtcgccagagatgataagaacaatgtgtttggaattgggttcaagacaaacccgccggatgctactggtgtgcctcatattctggagcatactacattatgtggcagtgaaaagtgaatcatatcatattcaatacctatatttttgctgaccttatgctccttcaagatttccaatccgtgacccgttctttaagatgcttccgcgctccctatcgaatttcatgaatgctttcacagcctccgaccacactacatacccctttgctacaaccaaccaacaagatttccaaaatcttctttctgtttatcttgatgctactctacaccctcttctcaaggaatcggatttccgacaagaaggatggcgcttgggccccgaggatccgcgtgctggagagtcgattcccgggcaagctgaaaaacagctatcattggaggacatcgtatttaagggtgttgtctacaacgagatgaagggccagatctctgatgcaaactatctctactatattcgtttcaaagagagtatctttccctcgctaaacaactcgggtggagacccagagtatatcacagatctcactcataagcagctgacggagttttccaaacgcaactatcaccctagcaactccaagatccttacatatggtgatatgcctctggctgatcacctgcagcagatcggtacagtcctggatggctttcagaaagggcacgcggatactgatatcaagcttcctctggatctcaccaagggacctcttaatgtgactgttccgggccccatcgatacgttcgccagcgaagacaagcagcacaagacatccacatcctggtacatgggtgacacaaccgatattgtggaaactttctctgtaggaatcgtttcctcgcttctcctcgatggctacggctcacccatgtaccgagcccttgttgagagtggtctgggctcttctttcacaccaaacacaggtcttgacccatctggtcggattcctatcttctcggttggacttaacggggtgactgaagcggaagccccgaatatcaaaaacgtgattcaaaacgtcttccgggaatccgtttctgctgggttcagcgaggagaaaattcgtggattccttcaccagctggagctttcgctgcgccacaagactgcaaactttggaattggtgtgatggagaagaccatttcgtcttggctcaacggctcaaaccccatgaaagagcttgcttggaatgatgtcatcgacgagttcaagagaagatatgctaaacctggttatctcgagtctttggtagagaaatacctcataaacgaccaatgcatgacctttaccatggtcggtactcccactttcaacaaagagttggacgagaaggaggtggtgcgaaaggacaagaaacttgcccagcttattgaagagcatggatcagttgagaaggctgtcaccaagcttggagaggaggaattggaacttctcaagatccaagaggacgcccataatgctgacctgagctgtctcccatcgttgagagtcaaggacatctcgcgagagaaggaacgcaaacctgtccgagagtcgaaagtcgagggcgctgacgtcgtctggcgtgaagctcccaccaatggcttaacctacttccaggccttgaatgacttcgttgatttgcccgatgaactccgattgcttatgcccctctttaacgactgcgttatgcgtctgggaactgccaatcggtcgatggaacagtgggaagatttgatcaaactgaaaaccggagggatctcaacatcgtcattccttgtgtcgtccccaacgcacttggatcatttcaaggagggtttgcagttctctggattcgctattgacaaaaacattcccgagatgctggaaatactctcggttttggtcacagagacggacttcacaagccctgctgcgcctgcgatgattcaagaacttctacggatgacgactaatggagctttggatgccattgcaggaactggtcaccggtttgctgtcaatgctgcggctgccagtctttctcggagcttctggatccaagagcagcagtctggccttgagcagctacaggctacggctaacctgctccgtgacgcagagtcctctcccgagcgtctccaggagctaatcgagaagcttcgccttatccaatcctttgccatctcttcgtccaaccttcgcgtccgcgtggtgtgtgaaaaggagagtgctggcaacaacgaattgattttgcaaaagtggatttccggactgcctcggacacagtccccaagcgccaatcttaccacgtcttccttcaagtcagccgacaaggctttctacgagatgccgtacaaggtctattattctggccaggctcgccaaactgtgccattcgttgacccatccagcgctcctctcagcatcttgtctcagcttctcacccacaactacctccaccccgagatccgtgagaagggaggtgcatacggagccggtgctagcaacggacccatcaagggtatcttcaccttcatgagttaccgagacccgaatcctctgaattcgctcaaggtcttcaaaaacagtggtatattcgctagagatcgtgcttggtctgagcgtgagattgaagaagctaagcttggcatcttccaaggacttgatgctcctatgagcgttgatgacgaaggggcccgctacttcatgagcggcgttacccatgaaatggaccagcgctggagagaacaggtcttggatgttacagccaaggatgtcaacgcggtcgctgagaagttcctggtgaatggctcacggcaagcgacttgtgttctgggtgagaagaaagactgggctgattcggaatgggagctgcgcaagctttccatggatgccgccgcataagcgatatcacccaaggatcgccattcagcagttgcctctttgtttttgcacaccttctccgaactggacatgatccttgtttagggaatttgtatcaccacctcacttccctgtgtatttctatatacttcactttcctccatcacaccctacttcacaccctaccttgtacatatatcgtgtatatcccatttgtatacatctctattcttctgtttcctccctgttttcatgtcttcccctgccttgacccccaacagcgctgaagatattcacgtgcttcggcaccgagctaatcacatctacaaccagtcactacctttggttgcaagatgtcgcattcatttccatcaggatgctcgcgcaagaacaaagggaatgtgaaccgccaggtacacttctcttctccgtttttcagacccgtcctggatttataagtctacacaggacggactaaaaacgagggaacataaatatcgtcatagaattcatagaattcgtaaacttcgtagaaatatcaaagtaaacaaatcttggaatctttcaatgtctttgactaaaagaatgaggaatgataattggtctctgctaaaaagcggagaaatggtgattccccaccgctgataagccccgatataactgtttctctttacttcttctccggttttttgatcagttatcaccgcgagtaatggagagtgactctgagtagccatgaagagatcgggcgccatggtcggcccgaagccgaccaaggcctgtggtgagtccgagacggcattggtattgtagagaaaagctaaccagtcaaagtaaattgccgacgactaaaggtatagacagactactttccaacatactagcaaaaagaccactcacatgaatcagatgaaatgcgaagtatccggacctcctccatgtcgccgttgccgtcacactcgaacagcctgtgtctttaagccccgggccaatgtgagcaaaggatcacggaaacaataacccagaaacaaagctaacacctcgtcgaggcatctgcaatgcatgaattaatggagatgcagcaagatcaagcttttgcttctctgtcagtgatcccggatcatcagtcgattttgaaccggctggccaggatcgaggccgcgctaggtatcactgaggaaccccaggaccccgaagaccaacttagtatgtctcgtggggcaagtctcgaagaagacacggaagtcgtgccactacaaggtgtatggacagcgcttgcgcatttacgactcattactcgtccgtctccagatgatagtatctggtcgcgatccgttgttcagcagctatggagctcgtaagcactatttaaatcaagatgtgacggccgatatctaacaatatcacagtttcttgaaaagtctcccacttctgcacttcctaacagatcatagcgcgttcgcttcccctacccctgtcctgctcgcttctgtgctttacatatctgctctacaccatccgtctgctaggctggcatctttgaactcggaatattgttccgctatgtatagtgctatcgctgagcttgtgacaccgtgtctgcgtggaagtgacctgcaggtatcagaacacaaggacgaagaacaaaagctctccccacaatccaaaagagagaaagcatttcacgatatccttgggttaataatggctagtctgagctgcgaggcttatgttggtgccacaggatcgtggattgcaatggcatatcgtatctggcttgatcattgcccagcagagatgaattccaccacgaaagactggcgtggcttgttctccggtcttcaggtaggagcaggtaacaaatcccgagattcggatactttatttacgtttgttggcttcaggtcattgatatcgaacacgcctcaatgcacatgtcctatccactcctcccacgacatgctgcaaatccaaatatacagcggctagatagccatgaaggaaatgccttccaggaccttgcagaaatgatgcactttggactgagtcattttgtcggccgtgggctaccgagcatatggtcctctctcaatgcagatgaggttgacatcgtgcctatagctcggtccccgtttactgaaaatgactcgcaggtcatccggcactgggcacggaaacttgatgactggctggtacgatataataactcatcccgtaagtatccatgagccagaatacaatctccggggctgactgttggtagagcccactccgtctgatcggcaaggtattctcattctgctccagtatcacctgcacaaactatacgtgctttcgatctatcatcctgctcgtggatttgatctcagtcctgcgaatattagttcttttgagcgacacgagttgctcgtttcggctcgggcagtgttgaggctgagacaagatgatgcgagcatatggtctaactgggacttggttgtaagttctgatccagagcctataattctatttttaacaacatagatgatcacatgggcggccgtattacttctccagggtgttgaagacggcatgactcacccagatggtatggcatttcgaaaaacagaattatcgacctcttctaatgttcgttctagatttacacctcatccaagcacatctccaaagtctagaacgaaggaatcagtccgctgcaagcattcatacctttctctcccaccgacttgaatctagtatgcaagctatgcataccccgccagacacaagcgtggcattatcattccctctcccaagcgcagatgactcatggactatatttgaccaagagataatgtctcttgcaaacccaccgtggttattcgatgaatcaacgcagctgccgcagatccaaaaggcttccacaatgcaccaattacagtctgggatccaacctttccagtacgactctgccatttcagcatctgcatcccaacactttgcaccagatacacagtagggttgcacagcggcgaggtgcgggtgttcagccgatcctcggtgtagtataatcaaccccgaaaaggatctagtggtgcacgaagaagcactgattgatgtaatctagaaacatgctatatacaattcaaatcacaaatgatgaaggaactcctacagccttcgaacactaaatctcagcttgaaagtgtccatcccctcatggtagtctttcatcatcttatctgccccagcccatttctccatcctagtctcaacctcccatctcgtccccgtttcagtacccacctgctcccagaacttcttccacgtagaaggatcatgacgatagtgctccccagaggcctccttatcttctggaggtggggggttcactaaaccaatctgtcgcccgattagaagggagccgggtttatcctggagtaacccaacgagccgctttgcgactagaatctgctggtcccaattgaaaagatggaagaaggaagcggcgttcacaatatcgattttgtgggtcagttgcttgactaggtcggaattgtcgtcgaatatgtctgctacaatgaactgggctttgaggtgatcgcggtcgttgaaaagctcatatccaatgtcgtagaagtcttggcgcaagtctgaagcatatagattttcagaagcgaccccgtcgaagacctgatttggtacgttaagttgcattcattgctctagaccctgcatgagctgtctggggtcttaccagttgacgcagctcttgcccgactgcacatccgacatcgagcagcttctggccagacttgagtctatccaggatttcagggtagagcggtgactgtgggatgctcaagtctaggaaccggaatgatccaatacatgggtacggaaactggggataattatcagtatcttcggccaacgagggaatcgtgaagacaattgcgtctgatgaaaaccacacaggccacgcttgtaggacatattgtcgggaagaaatatctaacttaccacagcgaatgctcgatctctctgattcattcgtcattagcgtgggcactctcgccatggaatgaaaaggactcaccacttttttcacatgttcaacctcgtgtcctggtgggattttgctgtacttctcgagcagagactttgctggctcaggaacctcaatcagttctggctcgtaccaggcgaacttatgaggatcaaagccgccatcgagtatggatctgagatcggactcggctttggccatcctggatgagccgaagttcgtctgtggtgcgaagcctgtggtgcaattgagcaatcctgtgcgatttggatatcgcagagcttggctgtgtacttcagtctcgtacctggatagaccggaagagcaattctgttgaggatgccccgcgtggggtgtggggacggccccacggtttggttctaatcgagaatgaagttcatctcaatggaaggtgaagctcatgaagaggactctaattaaagatccgaattcaacattcaaggacgatagcgaagcgacaaaagcaattggatgttgggaactgtgcaggagaaaattggcaagatttgaggaagatctatgagcctagagggggaatctcaaaatcaatcaggtttatcatttgcaatttaaaacgctcgagaactcctggcactctcgagactcttgaattcataggggtatagtaacaaaatcgctcagaatatcatacaaattaggtgatcaatggcaaaggtccacaataatcacccaaagcaaattacagcaatgcgtgtgaagactcgttaacacgatcaatcgagagaagtcgtatttccaccaagctcatgtggagatatagcccttggtgaggatttcgataatcccggagaatccatggccaaagatgaaggcgacatggataggcgtgggaatggctcgagttggttgtcggacaaccggcggcttgatgactcgctgaaggtctttttggaggtattaggttgctcttgtggtcggagacttggactagcggatattgcggcaggctaaaatgtaatctggttaatttcttcttcatttataccggaagatgaaaatctcatactttatcgctgcctcccggatcaaggcctcgactcaaagccagctcgtgtgcagcgagtcgtcttcgcgcaatatccgattcttcttccaatgccgcgcgctgctcttctgtcttcaggtctgccatcgatggtgtaccaacactttgagcaatcgcggcatcattgtaactagtcgaccgctttggggaccgtttcttcttccgctttgtctttctcgaggacgcaccacctagactagacgcggatgcagactgtacaatttcagacttcgccccggactgatcatctgattctaagcccgttccccggcgcgcaaaagcgagcgcaaactcatcatcgaggggcactgcatcttcctcctcgtcactagggaatagatccccgcgggaactaagtgagttgtccgttccgcgagaagattgcgtggtactgcgattcctcctattatggatgggggacaattgatcctcctcatcatcgtcatccatagcctccattagtggctcgtcttcgtgcatatagcgccgggcgccggggtgttcttgcagatctgcagctgaaggacgatacttgactcccctcgcaccgaatctccacggaaagcgctcgaggaagccgaggaatgaagagcttggaatcacagtcgggtcagcgcgattgtccggaatgtgcgcggtgctccttcgcctagtgttttgtgtcccgtagctcatcctcctaggccggcgcggctggtcagcagttccgtgcgccagcccgctgccagcaaggaggcggtcgagttcaccagtaccccatccaattaagccatcatcttcttcttcgttggcccagtcgtcgtaaaagtcaaagttggcttcggtttggccgcgtcgtcgccgccttaggtggtcttcacggctcggaaggcaaggtgctgtacatgcagtcacgcaatttccaatggattcaaaacacggggatatgtagttgtgggagaaagtataaagcccctcttgcgcggtttcgttggcggtctcaaggttatgggagatctgattaatccgttgtcggatgcggggatcgcgcggtcgcatcatattgggcaacgacgtgaagaatagagactactaatgacggatcttgtgtgattcgctccaccagctgtcgccggcgacattggaaaaatgtacggggagtaagcagaggtaagtgaggccgcagcatgaacccgacgatgtcattccttgctgagtcagcgcggataattttggcggaaatttgggtttgatgaagatacgattaggacggagaggcattgagggaggaaagcattgtattctatatctccaagatggtctactatgttagattcctgaaaacccccagaatccaacaacagaaaggggccatctacatctccgctcttatctgcatcaccactgatctaggggactcttttcttgctgaagatgttgatttgatggtgatagctgagaattcctctcgagttatatttcagaaaacgacaaaatggaatgccagtaatcgagaacttgctattaccctgggtcctctcccatccaatctggcccagcagtctatggtgttgacggttaaaatgccggactcaccagaatatgtcataccccagtattcccccatacaattagtggttgctgcaacaagtgctccatttgggcctcattccacaccagcagagaagctggttcaacgccgccttcaatacagcggctgtgaaccattccccatggaaatatgggaagagacaggaaatagcattgctcgacacatatggtaagtcactctgctacttccctttggctttttccctcgagattctaaatacaaattcctagggatgcgggcctagcaacagttacataccttcacctgatgtgtgaggatataaggaagacggcccgtaacaagaacaaaggccctgaacctaaaatacaagctttgaagcaggtcctatccgtctgcaaccgacctatccaggtagttgagcttggggcaggatgtgggatagcgggaattgcattggcatcaatgctcccgaattgttcggtattactcacagatctccctgaggttgaggagataataacacgcaatatgaatgttgcccaactcgcaaccatgtccagtcttcactatcaaaatctcgactgggacgacccaccggatgagctctgcccacggcctattgacctcattcttgtctctgattgtacctacaattcagatagcttgcccgcgctagtctctacgcttgaccgattggttcggacctccccagaggcaatcgtcttggtggctctgaagagacgacatgacagcgaaacggtgtttttcgacttgatgcgctcggcgagatttacggcggtgcaggacagcgttgaaatcccttcgcagcacgatgaggtggatgaaattgagttttactgctacagtcgattaatttagcatgagaatgaccccctgggtggaaagaaaatatacccccaatcaataaaaggacgacgtcgaagcataggtaacaagaagcgagaggatacaacggccctgtatgaaggatctcgtagatgctccaatcacgacaatgcggttttttttcccggaaaatagttctgtaatttataccactatggcgtacaatctacatctgactattgaagatgtctactatcaaacgcagaatacatgctgggatcgcactgacactaatcaggtggagatgagattaagcatcgaggctacgaaacaatttatacaagtgtaacaagaataacatagacgggcatctcacggcatacctcgtttatccttggtttttacattgctaaggtatcttctctggcatctcggtgttttgcttctcggactataaaaggaatcatctagtaagagagggtggatcgttccccaatttaacgatggtcccgaggaccacttacaaaccagcagaattcaaaggtggatatagctatattcataccagaatgaagtcaccgaagaactggaggctaaataagatgatctacgttttgctgactggatgccttgagtcctcggaactcttcgcggtgtacaatttcgggtttggataaagtctatcaagcctctaggtggccgggatcaatacagcaagactattagtgctagcattgggctaaatatgtatgctgcattttctaaatgaccagtcctatctataacataagctgttgatattcttgtggtccgtgcacaaagtggacagctgagtggaatcgagtgggatcaaatgtgcgtcattatgggttctcgcccaaggcctattacccaagagcttgacctcaagcagttctgggcatatgtactgtaactcggcatggtgcatagaactacctgcaagtatatcacatagctctatatggagtacggagtactccgtaggtgcataactaacaatttaaacatcccggtaggacagtacgaacagtactgccacgtatgtacctgaatgtacgaaagtacctgggatctactcccgaggtctgctcggagggcaaatcacagatacacacacacaccgctgccattgaatccagcaattccgagagcatgggatttagctcctgcatcatgcagtcgcacctaggaagagaaagacctatcgcagagccggcgagatggtaataatggatgcctaaacaaggcccaaattaatcgcgcaggcttgtccgaaagagtaatagaggggaagctcgtgaagacggaggagctgaaaagccctggaaaagccctggggagctgaagaaaccctttttccggctgagtcagcaccgctcttttttcctcgaggtagacgaagggcttcgtcatcttttcagggcttctttcaactctccctttttctatttgggtcctacagctcctcattttacaaggtgagtctttttattttcaggttaacttgattgggatccccgtgtgtgactccgtgccgcgttttatttcctcgtgtgccctaagctcgctcactgcccccccaagaaaaatttctcaaaatcaaaaaccctcgatttccccccccccttcctctcactcatactctccccccctcttatagttctcatagcagctggactatatcaggcttgctaaccacgtctctgcccttagatttattcggtcctctaggtcctcttttcagaccctgcctttggaatccccaaaggcgattcggtcaccacggctccagtagcctatcttctggttcttagccaaattgtctccacccaacgtctccgcgacactcttaacaacattccacctcctggtcttttctgaactctcgtccggttcgcctattttcgtcccgttgacgtccccggagattatccccccgttctctgagctgccgcataggacttctttcaaggttcttcctcttcagggggaagggtctaggaggcttggtccagtcaactacggttgtgacacttttcgtcctccctaacgcgcagtcgcctgccgattaaaaactttctatcatctctctatttctattcaaattgtgctgagtcgcagcggcatggttatggcaccgactgcgtgtgtatcgactgctgaagtatgcaccttcagaaaagactataccaatagtctggaccatctcggtcttgtcagcagtcatggcggggacaacaatttgttgcaatcatcgttgactgccaaggagcttgttctggatgtgttgaggaagcgtgcggcggaggtggatttggaccaatgtggtcctggtgaggaggatcctttttacgttgcggatatgggtgaagtctaccgccagcatatgcgctggaagatgaatttgggccgtgtcaagcccttctatggtaggcctcactctttattcgacagcccaccatggacccctgctaatgaacactgaacagctgtcaagtgtaacccggacccagaagtcctccggctcatggcccagcttggaaacggtttcgactgtgcctccaagtctgagatcgatatggcccttcagacgggcattgatcccagccgcattatctatgcgcaaccttgcaagaccaagtcttacctgcgctatgctgccgaggtcggcgtcaagcagatgacctttgacaatgccgatgagttgtacaagatcaaggccaccttccctgaggcggagctctacctccgcatcttgaccgatgactcgaccagcctgtgccggctgagcatgaagttcggtgcttccatggaccaggctcgtccgttgctcgaactggcttataaattggacctcaaggtcgtcggtgtcagtttccacgtcggatctggcgccgaggatccccgggctttcctcgaggccgtgcaggatgcgcgcacagtctttgatcatgcggaagagatcggccacgagctccacactctggatgttggcggcggcttctgccaggacacatttgagaagttcgcgggcattctgggcgaagccgtggacacttatttcccgccaaacatccgtgtgattgccgagcccggtcgctactacgtagccactgcctacactctggccgccaatgtcattgcgcggcgtgacattccgcatcccgatgatccctcgcgcgatgcttccatgttgtatctgaacgacggcgtctatggcaacttttcgaacatcatcttcgatcaccagcatcccgtcgctcagattctcacctgtgcctcggacggctcccagcctgcttccccgaactctgcgacttcggaggacatcacttattctatctggggccctacctgcgatggcatcgatgttataagtgaaagcattgccttgcctggcctgctggacactggcgactggctctattttgaggagatgggagcctacaccaagtgcagcgctacccgttttaacggcttctcggacaaccacgaggtgatctatatttctagtgagcctggtgcttccgctttgctcaactactagtttgaatactgttttgcttcacaatcgtttacaattgtctttttgttggaatcgctttttgtttattgacctctacccggaggaggccgtctaatatagtatctatcgtgcgttctcgctgcatatacgatcgtattttttgccattagattctaaattagaatagagcttgtcgtgtttgcatcaacgtccattgactaggtatcttttggtatcttttctgctggacgttttgctatattgttatcgtcaatgctttcgaacataagatatgaaaagtcttgatatttatttacaggtgtatcatgttctctatcatcacatctacaaggtatcatgagaaactagtccgtaccaacatcacggcatctatgaacaagagctggcctcatcaaaaatctagaccaaacgctccacactcaactccacaccctcttcctcgcctgcctgaatcagcccaccagcttcgagcttcttcttccacttagccgactcgtatcgagcaagaatcaatgtaatgcgggcaatgacagccgggtctgcagactcggcaaccacagcggaaggagtgcaggtccaacgtccaaacgcccaattgagaatataatactgcatgccaggcgactcgagcgtctgtctcgcattcaaatcatccgatgtctccaccggaagatcctggttcgagcagcgaacaatccccttgatgcgatacacctcctcgcgaggcgtcaaagagagaaaccgctcgagagcagcaacatccaccgtcttcccctggacatcggacttcaaaaccacagacagaacctccacctcggactgatgatcatgttgatgcttactctcatgtccattgccagcctcttcctccttaaacaaagccccatcaatacccagcatcacttccatatcaacccgacccttatccgacttaacccaaggtgtctcaatctccaaatcaccaactcggtccagacaaacatcaaaccgctcaggcatatcctcccacttattaaaaacaatcaaatcggtatacttggcctggatctttgccgtgtacgaggtatcctcatatccctcccagttctcgacatctataacactaatcacaccatcgagaacgtaatgtccaccatgctcgcgcgcaagcctgttcacctccatcgcaagcgttgcggggaacgcgctgccgctggtctcgatcacgatgcggtcgggtttcacttcggcgcggagctggtccagtgcgtcgctgacttggccaacgaggttgcagcatatacagccattgagcatttcgcgcacgctgctgatggattgcgttgaggccagttgggagtccacggctacgtcgccgaattcgtttttgaggagggccagcttgtaggtctttggaagttgcgggattaggttgaggaggatggttgttttgcctgagccgaggaagcccgtcacgatggttatggggattggcgccattttggggttgcttggcgacttttgttgagtctgtggttgttgctttctgatgttggcggcgggaggctatcgccgatggaggggcactagccctagtttaggagccctaattacctccttgggattgttgaagaaatataaagcgtatcttccttttaataagaataaagtcaaataacatctctaccagtatcttggaagctcgtagttgttcataggatatacctcgaaatgcgagagttgagattgagtagttgacaagaaaccttccagagtaggtatattttatatagttacatcgcaaggtatgaccaaataggctgtacagtaattcagacctagatgagcatgactgtgcacagactatccgagaaatagcagttacccaaatccagcccataaaccacgatatcgcacgaagtatcaatgtctcgagacggatctattcttcgaacccgttgttcccgtggtcggtctatcgctagccctatcccacgatcgatactcagatcgctcacggcgagagtgacgtgctggtgcaccacggttggtaaccaccgagtggtctgtgtgattgacggactcttggttgtgttcttgatcggattcggcatcgctggaccgattcatacttccggatcgggggcgcattgtgtatgatagagtttgagaagaagagggctcaagttgattattgtgaagtcgaacggtgatggtcctcttttatacaaagtggcggcggtggcacacttgacccaaacattgacatttacttcattgtgaacgcattttgatgcaattgacagagggtccactggaggaattcttttattaacctatttaacgatcgctgcttgggttcatggattgttgaatcctagccggtctgatatattcatgtactttctacctacttaagtagcatagccagaaaccgacaataaagaaagaatgcgaaccaaatagacattcaaattccgagtttgcctaaggacaaagagattcaggatcatgtcatatatccttaaatctcaaggttattttatagtcccagtcccttggtacctccagtcgtatttggttagctgcataccttaaattccaccgaggttccactatgcctcgacattgccccttcgcatacattgcatttcatgacaatagtttttatctacatgactctagaattcacccgcctttgcgaattgtgaataggatattgtctgctgtgaatccattaccatattacttagcagtggaactacttaacctcgtggaaacgcgaccgcagcaattattcggcccgtagatgaacaacccggacgtcaaagcccttcttaccgcaaataccaataatcctttgacccggggactttcaggttgccgtggttcgagtgtacgcgtcctcagggtgagatcgagtgtttctggttgacttcctgggtttggatgtgcgcactcgacagaggatttagagcagctgtctatagcctgagcagtatcaatttggatcgagtctcagcattgccactcaaatagtctcagtctctgcgacatccttattatacatgtgaagtaatcagcgagaatcctgcccccctagagaggagatgcgatcggtgacattcggaatattcaacaagcggcaaaagacacgaattattcagatccccagtcaatggagaataaaatcccaaaacgccaaaaatgtatgatctatctactttgttggctgtgtgtgcttattgctcatatgtctctctcgtaggaaatcgcaaacctgttcgttgctcattttatcaacgcattcgcgttcctcctgggaaggttctaaaatataacactgtcatcagcaatcaagtcatacgtgctgccaggaaactcatgcatgaacatacctggaggtaccatctcctgagcttcatttgatccacctgaaatggcgcgaatgtgaccttgaacggtacgtaaggctccctgcgcagcaggatacgcttcgtccattaaagtatccttcgcggcgatcatcttctcttgggcggcagagctaacggaatttccaaactccgacatggagccaccaggagccatcgagtcgagttgatgtttcatgcccgtaagaacaccttcctgtccttcctgtccttcggctttatggaaagcggcgtcatttgcctccatctcgacctcggattgcctccgttgtccgagtgcaacattggaatccaggtacaatgagtcgctggaggggtttggactcatggtgaagcagtttgctcccttggattgggagtatttttcggattctgggaatgacatgggcgcggagaataacgaagtggaattagaagcaaaaatggtaatggtaaggcgtagggctgagtctgacgtagggctgatatcgggatctgttcgggtctagtatcggagtgggcagggtacaacaatagcgagtagggctattgaccaggattctgcagcaggaatctcttttgggtaattgagtgattgagtgattgacattgtttcgctggacttttccccccgaaagatgttgctgatcgttcctagaaatgacgtcactggaatccacctgcagatgcgttcatcggcaaaggagattcggcgtactctgctctatttttggatactacactattcattcacttccaagtcggaccgaggttctttatcacttgaatttgaactacagttgctctttgctattttcataccgggaaattcaatcatttaatgcaaaatgcacatcatataccgacccgattagttgtagatcgccgcctggaggccaggaatgatctcgagatccttcggcttataggtgtatttcccctcactagaaatcttgacatcccgattctttcgctgctgctgtgtctgtcgaactttaacccactgctcagtcgtcaggtgctgtccaagttcggtgaacgcgttggtagtcaagccaagtctctggaggagggggctgttctgaattgggtcaaggataacgtggttgttggggctatattcattagaccctgaagactccggtgccgcatagccgaaggaacttaccgagcaaaatacaacacacccaatcgatcaatatgagcctggtcagcagggggtgcgtggacccggtgaatactcgacttaatcaagccacccgtgagcgcggtgagggcgtcgcatgtgttgatagtaatggtcccgtcctggggcttgacccacttccattgaccctctgagttcaggatctgaagtgcagctaccggttgtcggaacagaagagtaactgttcccaagtctgtgtggccgggactgtagagctcaccgaccttcttgttatcctcagcgctgcgggctgcataatgcatatagcgcagatgatcctcgcccttgaggtcgtattggtggtcgcggactagttggtcttcgtctggcagctcgagcaggattgcgaagaggcggagaagcttctcaacaacttcggtgtggcatttctttagttcgggtcagttaaaggaatagacgacgatgataaaaggaaaattacccgactgaaagtttcaatctccttaatgttttcggcaatgacagagggctggggacgctcgtggtaaccgtcgaactttggaatattgtatacctggacattatccttgatgccatttcctaagctgagttacgtgttagcgtttctccaatatgtctctgagggcgatctgtttcttacattcggtgccctgcaggacggtaagagttatattcacctctttcaagatcactggcgctgtggaacttgagtttctcttcaagtggcagggcatagaactcccgccctagagcgaactggttgtcgatctcttcttggctaatgttaaagttcttaacgtaaaagaatcctgtttcaagtctgattagcactaagccaaggatcgagcctactcgaattcatatccccggcctcagcacggagcacaaagaagcgtcgactcaccaacatttctaacagcgtgatcgagctgcttgacaagatcttcctttcctccaggttggtcatactgggtaaggtccagtgtgataagctcagcccagtcaactaatcccggagcagtcagcaagacgaaaacaccaagaaatcagcattacccacggtcttccttggtcacagggacctgatcatatttttcaatgtatttgcccggcattttgggcaggctatgagtttccaagaggcgaacaagtatatgcagctacttcaagtagctcgtttccacatcaacaccttaggaaacacacgtcgtatataagtctattcgcacatcattccgacgatatacccccgcatcagatagcggagggattttataagagcacgcaataaattcgtccgatgaggcctgagataacggccaatttccggatttcgtgtggtagaccgggattcgcgcacgccatcatgcagaaacatgtcgtctccgccggcgcatcaaagtgaacggcaaatgtgttagcttcggttccagacgtcctttagcctcgtggatggtctgttttgactattaaaaattcctgaacgagcgatggtgacagcgagtggggaaattggttaacatctctacggctagctggtttttatatgccgagatgctatatcaagagatcctataagtaatggcggtggtctataatttaatgtgctttgtcttttgcacctttaggaacagcatcggacgtctgccgagccttccatgtctgacctgaaacccaaggccgggagattgtcccctctgggacttttcaaggaagtatttaattggtacccatcttcatatcctgccgaggagagaaagtaagcagatcaaggtttgggagagtatctctgtcgatctatactgacgttgccagattattattcaagttggacttgtccattctgatatttgcttgtctctgctgtaagtacacaagtccaaatgatgcacccgagagacgccactaacgaactcagtctttgtcaaatatctgggtaagcctatttccacattcaatgccctttgactcgatgccaatatatcgcagaccagacaaacattagcaatgcatatgttagtggtttgaaagaggacttcggtctgtacggcaatgagctcaactacttcaatgtctgctacttttgttcatatgtgctattccagattcctggactactgctcatgtcacgcccaaagttgtgagtatcaggaattgatctctttctcacccataccaagcgactgactcattctatagggctcgctggttgttacctacactcgaagttctctggggtatttgcacatttgcccaaagccgtgtcacgaacgtacaccagctctatgcccttcgtttcttggttggaatgctagaagcacctgtctttgctggaacgcatttcattctcggtaagttcaaccaatatatgtagtcatctggtatactaaccataaaaaaggttcatggtacacaggtcccgaactgttcaaacgagccggaacatggttcatctgcaacccgctcggtactatggttagtggataccttcaggcagcggcttataccaacctttctggtgttgggggtatgccagggtggaggtggctgttcgtaatcgacggcatatttaccatccccgtggccttgctcggattcctcatctttcccggtattccgggctcgcctaagccattctatctgacggaccgtgatattgaattggccaaggagagaactaagagagccaagattcgccagcctggcaaaatgagtctcgacgtctttaagagaacctttaagagatggcacatttgggtctttatcacttgctacgcgtaagtttggaaaggattcactgctgtagtcaatttactaacgttggttttagatgcatgatcatctgctcctatccaagcagctatatgagcctatggctcaaacaagagggatactcagtgactcaaatcaaccagctgccgactgttacttacgcgattaacatcgtggcctcatggctagggacaacattagctgcgatttatccggaatggatcatttacaccattgcatcggcatgctgtctattctcaacattatgcatgatagtttggaacatccctacaggcctgaagtaagataactccttaactagtcctcagattgagtccgtggtactaacaagcttcttcaaagattcgttgcctggtatgtcttcggagcggctggatgcttgagtccaattctatattccaccatcaatgtgatagtgagggatgatgcggaggagcgtgctctcataatggtacggcaattcctttatccagcggacaaaagaaatcatactgaccagcatctttcttgcattacagggctccatgatgacatttggctattcattcaatatctgggttcctttgctggcatacccaaccgccggccccgacggtgcgcctagatggcgaaagggatggccagtatcatttgtctttttcttcctgctgtgggctggtttcgtaacttctgtttacatatggcgaaggtaaaatcccgtcctgaaatattggtgaatattaaactgacatattattatagggagcaaaggaaacaagccttggtgtcaccccaggaaagtagtgacgaggaaacggacactgtagtagttgatgggaccccgacattgaagaactgaatcaaatctcgtagatggttcgatattgatcaaatattatctaaatatctcggatagatactaataaatggcgtttctcgtaatataaggaatagtccggtaacgacatctgccttacggtatactagggccttgggcggtgatctttaatgaaatttacattgtaatattgggacctgtgaattactgtatccggttagttttgcccttcttggtttagcgccctaatacgccgtcacgtaacctctcttcaatgccctccggcataaaagaccagtcttcgctgctcttcctccctttctcccactttttcatttttctgcctctctattttgcactcatcgccgccccctttcttttactctggcccccaccgagtactgcacatttgctttcagcccgatgtactgcccctttcatttttaccggagatgccgcttgatccgatatccagcttataatgcctatcacctagaatcgtaaccactgggatgatacagcatcctgtccttttgtgtcgatgatcctactccttccctagggcagtgactgagcaccatgctataaagatatctaggtctccctctgctagtgtgcctttctgtctctgactcggcgggcctccctttaaatctgtaaagtgctagtataccctcgacgctatatatccctctcctaccgccctacctaaggttacgttatatagccccggctttatagaatagctcctagttatctggctaaacgcccggttatcgttattgtcggtctctccggtccctttctacctaatcggtgaaaactcgaaatcacagctcggtcatataggctaatagcgaaaatactgtatacgccctagaccttggtcgatgctatatcttgtagttaatacgagactgtaactgcgggaatttttgctagtaaactataacttgttatagactgtgtgactaggatggtctagcgtcctcgactataataggttagattataggatctggttgagattatctactcttagtagaagaagaattctatcctccggcctctatcgttatctataaaagagactacagttccaataatatagtaaaactagaatttaaatcgcctttaaattctcctcttcgcctattccttattctctaccagtatctttattttataagtacctgtagtcaccatatcctaaagagtctttagtcgtctcttcacaatatatgtcaagtataagttttcccttatattttttttagccccggagttacgtataatacctcacccgactagacgctgatccttatactagtagccctttagagataaccccttcgctatagccctcttctggtaaggcgtagtaagatagaccgtagactctttcgaatgaaacactttgatctaataggagaaatgccgtatatatatcggccttacgcgtgacttagtgatttccggataggttggtagatctctgtatcggtagggtacgttttgtctcgtgaatcttgtaaatccgacctactcaaaacgcctagaagaggcagggggcggtaggcaggtataaaaggtcgttagaactcctcagactatggaagaggctaactacctatttatagttccttctcttctattctaatacattgcgtttaaatctttcttgcagtatggaaccgatcaattgaacgatatcatctattatcgtccgcctgctaaaaagaaaaaaaaaaaacgtttcaaactgttccaggcacccggttcctacgcctatatctattcacagttatcttcggatagacctacgccagcccatccgtttctacctagccagtactggcgtccgagtcttttattcccagggcatacgccgttcctctaaactaagactttcgactctcaagacattttgcaattgtaagacataccaggtatcgaatacattaattctataataatgcccgataacatttagacgctaagtatcgatcccctggtttaggatcgtgcgacttagagcctgccgttattaatagtcagtaccactcttaagctatcgattctagactagagagcttctaaacactgaaacaatcgatcccacgatcctcgacgatcatacctttctaggtagtaagtagacatcggcaaagcccagcataggcctaagatttcggcccatggcctaacctatataggctataggcccagctcccctaggcctagcctagcnnnnnnnnnnnnnnnnnnnnnnnnnnnnnnnnnnnnnnnnnnnnnnnnnnnnnnnnnnnnnnnnnnnnnnnnnnnnnnnnnnnnnnnnnnnnnnnnnnnnnnnnnnnnnnnnnnnnnnnnnnnnnnnnnnnnnnnnnnnnnnnnnnnnnnnnnnnnnnnnnnnnnnnnnnnnnnnnnnnnnnnnnnnnnnnnnnnnnnnnnnnnnnnnnnnnnnnnnnnnnnnnnnnnnnnnnnnnnnnnnnnnnnnnnnnnnnnnnnnnnnnnnnnnnnnnnnnnnnnnnnnnnnnnnnnnnnnnnnnnnnnnnnnnnnnnnnnnnnnnnnnnnnnnnnnnnnnnnnnnnnnnnnnnnnnnnnnnnnnnnnnnnnnnnnnnnnnnnnnnnnnnnnnnnnnnnnnnnnnnnnnnnnnnnnnnnnnnnnnnnnnnnnnnnnnnnnnnnnnnnnnnnnnnnnnnnnnnnnnnnnnnnnnnnnnnnnnnnnnnnnnnnnnnnnnnnnnnnnnnnnnnnnnnnnnnnnnnnnnnnnnnnnnnnnnnnnnnnnnnnnnnnnnnnnnnnnnnnnnnnnnnnnnnnnnnnnnnnnnnnnnnnnnnnnnnnnnnnnnnnnnnnnnnnnnnnnnnnnnnnnnnnnnnnnnnnnnnnnnnnnnnnnnnnnnnnnnnnnnnnnnnnnnnnnnnnnnnnnnnnnnnnnnnnnnnnnnnnnnnnnnnnnnnnnnnnnnnnnnnnnnnnnnnnnnnnnnnnnnnnnnnnnnnnnnnnnnnnnnnnnnnnnnnnnnnnnnnnnnnnnnnnnnnnnnnnnnnnnnnnnnnnnnnnnnnnnnnnnnnnnnnnnnnnnnnnnnnnnnnnnnnnnnnnnnnnnnnnnnnnnnnnnnnnnnnnnnnnnnnnnnnnnnnnnnnnnnnnnnnnnnnnnnnnnnnnnnnnnnnnnnnnnnnnnnnnnnnnnnnnnnnnnnnnnnnnnnnnnnnnnnnnnnnnnnnnnnnnnnnnnnnnnnnnnnnnnnnnnnnnnnnnnnnnnnnnnnnnnnnnnnnnnnnnnnnnnnnnnnnnnnnnnnnnnnnnnnnnnnnnnnnnnnnnnnnnnnnnnnnnnnnnnnnnnnnnnnnnnnnnnnnnnnnnnnnnnnnnnnnnnnnnnnnnnnnnnnnnnnnnnnnnnnnnnnnnnnnnnnnnnnnnnnnnnnnnnnnnnnnnnnnnnnnnnnnnnnnnnnnnnnnnnnnnnnnnnnnnnnnnnnnnnnnnnnnnnnnnnnnnnnnnnnnnnnnnnnnnnnnnnnnnnnnnnnnnnnnnnnnnnnnnnnnnnnnnnnnnnnnnnnnnnnnnnnnnnnnnnnnnnnnnnnnnnnnnnnnnnnnnnnnnnnnnnnnnnnnnnnnnnnnnnnnnnnnnnnnnnnnnnnnnnnnnnnnnnnnnnnnnnnnnnnnnnnnnnnnnnnnnnnnnnnnnnnnnnnnnnnnnnnnnnnnnnnnnnnnnnnnnnnnnnnnnnnnnnnnnnnnnnnnnnnnnnnnnnnnnnnnnnnnnnnnnnnnnnnnnnnnnnnnnnnnnnnnnnnnnnnnnnnnnnnnnnnnnnnnnnnnnnnnnnnnnnnnnnnnnnnnnnnnnnnnnnnnnnnnnnnnnnnnnnnnnnnnnnnnnnnnnnnnnnnnnnnnnnnnnnnnnnnnnnnnnnnnnnnnnnnnnnnnnnnnnnnnnnnnnnnnnnnnnnnnnnnnnnnnnnnnnnnnnnnnnnnnnnnnnnnnnnnnnnnnnnnnnnnnnnnnnnnnnnnnnnnnnnnnnnnnnnnnnnnnnnnnnnnnnnnnnnnnnnnnnnnnnnnnnnnnnnnnnnnnnnnnnnnnnnnnnnnnnnnnnnnnnnnnnnnnnnnnnnnnnnnnnnnnnnnnnnnnnnnnnnnnnnnnnnnnnnnnnnnnnnnnnnnnnnnnnnnnnnnnnnnnnnnnnnnnnnnnnnnnnnnnnnnnnnnnnnnnnnnnnnnnnnnnnnnnnnnnnnnnnnnnnnnnnnnnnnnnnnnnnnnnnnnnnnnnnnnnnnnnnnnnnnnnnnnnnnnnnnnnnnnnnnnnnnnnnnnnnnnnnnnnnnnnnnnnnnnnnnnnnnnnnnnnnnnnnnnnnnnnnnnnnnnnnnnnnnnnnnnnnnnnnnnnnnnnnnnnnnnnnnnnnnnnnnnnnnnnnnnnnnnnnnnnnnnnnnnnnnnnnnnnnnnnnnnnnnnnnnnnnnnnnnnnnnnnnnnnnnnnnnnnnnnnnnnnnnnnnnnnnnnnnnnnnnnnnnnnnnnnnnnnnnnnnnnnnnnnnnnnnnnnnnnnnnnnnnnnnnnnnnnnnnnnnnnnnnnnnnnnnnnnnnnnnnnnnnnnnnnnnnnnnnnnnnnnnnnnnnnnnnnnnnnnnnnnnnnnnnnnnnnnnnnnnnnnnnnnnnnnnnnnnnnnnnnnnnnnnnnnnnnnnnnnnnnnnnnnnnnnnnnnnnnnnnnnnnnnnnnnnnnnnnnnnnnnnnnnnnnnnnnnnnnnnnnnnnnnnnnnnnnnnnnnnnnnnnnnnnnnnnnnnnnnnnnnnnnnnnnnnnnnnnnnnnnnnnnnnnnnnnnnnnnnnnnnnnnnnnnnnnnnnnnnnnnnnnnnnnnnnnnnnnnnnnnnnnnnnnnnnnnnnnnnnnnnnnnnnnnnnnnnnnnnnnnnnnnnnnnnnnnnnnnnnnnnnnnnnnnnnnnnnnnnnnnnnnnnnnnnnnnnnnnnnnnnnnnnnnnnnnnnnnnnnnnnnnnnnnnnnnnnnnnnnnnnnnnnnnnnnnnnnnnnnnnnnnnnnnnnnnnnnnnnnnnnnnnnnnnnnnnnnnnnnnnnnnnnnnnnnnnnnnnnnnnnnnnnnnnnnnnnnnnnnnnnnnnnnnnnnnnnnnnnnnnnnnnnnnnnnnnnnnnnnnnnnnnnnnnnnnnnnnnnnnnnnnnnnnnnnnnnnnnnnnnnnnnnnnnnnnnnnnnnnnnnnnnnnnnnnnnnnnnnnnnnnnnnnnnnnnnnnnnnnnnnnnnnnnnnnnnnnnnnnnnnnnnnnnnnnnnnnnnnnnnnnnnnnnnnnnnnnnnnnnnnnnnnnnnnnnnnnnnnnnnnnnnnnnnnnnnnnnnnnnnnnnnnnnnnnnnnnnnnnnnnnnnnnnnnnnnnnnnnnnnnnnnnnnnnnnnnnnnnnnnnnnnnnnnnnnnnnnnnnnnnnnnnnnnnnnnnnnnnnnnnnnnnnnnnnnnnnnnnnnnnnnnnnnnnnnnnnnnnnnnnnnnnnnnnnnnnnnnnnnnnnnnnnnnnnnnnnnnnnnnnnnnnnnnnnnnnnnnnnnnnnnnnnnnnnnnnnnnnnnnnnnnnnnnnnnnnnnnnnnnnnnnnnnnnnnnnnnnnnnnnnnnnnnnnnnnnnnnnnnnnnnnnnnnnnnnnnnnnnnnnnnnnnnnnnnnnnnnnnnnnnnnnnnnnnnnnnnnnnnnnnnnnnnnnnnnnnnnnnnnnnnnnnnnnnnnnnnnnnnnnnnnnnnnnnnnnnnnnnnnnnnnnnnnnnnnnnnnnnnnnnnnnnnnnnnnnnnnnnnnnnnnnnnnnnnnnnnnnnnnnnnnnnnnnnnnnnnnnnnnnnnnnnnnnnnnnnnnnnnnnnnnnnnnnnnnnnnnnnnnnnnnnnnnnnnnnnnnnnnnnnnnnnnnnnnnnnnnnnnnnnnnnnnnnnnnnnnnnnnnnnnnnnnnnnnnnnnnnnnnnnnnnnnnnnnnnnnnnnnnnnnnnnnnnnnnnnnnnnnnnnnnnnnnnnnnnnnnnnnnnnnnnnnnnnnnnnnnnnnnnnnnnnnnnnnnnnnnnnnnnnnnnnnnnnnnnnnnnnnnnnnnnnnnnnnnnnnnnnnnnnnnnnnnnnnnnnnnnnnnnnnnnnnnnnnnnnnnnnnnnnnnnnnnnnnnnnnnnnnnnnnnnnnnnnnnnnnnnnnnnnnnnnnnnnnnnnnnnnnnnnnnnnnnnnnnnnnnnnnnnnnnnnnnnnnnnnnnnnnnnnnnnnnnnnnnnnnnnnnnnnnnnnnnnnnnnnnnnnnnnnnnnnnnnnnnnnnnnnnnnnnnnnnnnnnnnnnnnnnnnnnnnnnnnnnnnnnnnnnnnnnnnnnnnnnnnnnnnnnnnnnnnnnnnnnnnnnnnnnnnnnnnnnnnnnnnnnnnnnnnnnnnnnnnnnnnnnnnnnnnnnnnnnnnnnnnnnnnnnnnnnnnnnnnnnnnnnnnnnnnnnnnnnnnnnnnnnnnnnnnnnnnnnnnnnnnnnnnnnnnnnnnnnnnnnnnnnnnnnnnnnnnnnnnnnnnnnnnnnnnnnnnnnnnnnnnnnnnnnnnnnnnnnnnnnnnnnnnnnnnnnnnnnnnnnnnnnnnnnnnnnnnnnnnnnnnnnnnnnnnnnnnnnnnnnnnnnnnnnnnnnnnnnnnnnnnnnnnnnnnnnnnnnnnnnnnnnnnnnnnnnnnnnnnnnnnnnnnnnnnnnnnnnnnnnnnnnnnnnnnnnnnnnnnnnnnnnnnnnnnnnnnnnnnnnnnnnnnnnnnnnnnnnnnnnnnnnnnnnnnnnnnnnnnnnnnnnnnnnnnnnnnnnnnnnnnnnnnnnnnnnnnnnnnnnnnnnnnnnnnnnnnnnnnnnnnnnnnnnnnnnnnnnnnnnnnnnnnnnnnnnnnnnnnnnnnnnnnnnnnnnnnnnnnnnnnnnnnnnnnnnnnnnnnnnnnnnnnnnnnnnnnnnnnnnnnnnnnnnnnnnnnnnnnnnnnnnnnnnnnnnnnnnnnnnnnnnnnnnnnnnnnnnnnnnnnnnnnnnnnnnnnnnnnnnnnnnnnnnnnnnnnnnnnnnnnnnnnnnnnnnnnnnnnnnnnnnnnnnnnnnnnnnnnnnnnnnnnnnnnnnnnnnnnnnnnnnnnnnnnnnnnnnnnnnnnnnnnnnnnnnnnnnnnnnnnnnnnnnnnnnnnnnnnnnnnnnnnnnnnnnnnnnnnnnnnnnnnnnnnnnnnnnnnnnnnnnnnnnnnnnnnnnnnnnnnnnnnnnnnnnnnnnnnnnnnnnnnnnnnnnnnnnnnnnnnnnnnnnnnnnnnnnnnnnnnnnnnnnnnnnnnnnnnnnnnnnnnnnnnnnnnnnnnnnnnnnnnnnnnnnnnnnnnnnnnnnnnnnnnnnnnnnnnnnnnnnnnnnnnnnnnnnnnnnnnnnnnnnnnnnnnnnnnnnnnnnnnnnnnnnnnnnnnnnnnnnnnnnnnnnnnnnnnnnnnnnnnnnnnnnnnnnnnnnnnnnnnnnnnnnnnnnnnnnnnnnnnnnnnnnnnnnnnnnnnnnnnnnnnnnnnnnnnnnnnnnnnnnnnnnnnnnnnnnnnnnnnnnnnnnnnnnnnnnnnnnnnnnnnnnnnnnnnnnnnnnnnnnnnnnnnnnnnnnnnnnnnnnnnnnnnnnnnnnnnnnnnnnnnnnnnnnnnnnnnnnnnnnnnnnnnnnnnnnnnnnnnnnnnnnnnnnnnnnnnnnnnnnnnnnnnnnnnnnnnnnnnnnnnnnnnnnnnnnnnnnnnnnnnnnnnnnnnnnnnnnnnnnnnnnnnnnnnnnnnnnnnnnnnnnnnnnnnnnnnnnnnnnnnnnnnnnnnnnnnnnnnnnnnnnnnnnnnnnnnnnnnnnnnnnnnnnnnnnnnnnnnnnnnnnnnnnnnnnnnnnnnnnnnnnnnnnnnnnnnnnnnnnnnnnnnnnnnnnnnnnnnnnnnnnnnnnnnnnnnnnnnnnnnnnnnnnnnnnnnnnnnnnnnnnnnnnnnnnnnnnnnnnnnnnnnnnnnnnnnnnnnnnnnnnnnnnnnnnnnnnnnnnnnnnnnnnnnnnnnnnnnnnnnnnnnnnnnnnnnnnnnnnnnnnnnnnnnnnnnnnnnnnnnnnnnnnnnnnnnnnnnnnnnnnnnnnnnnnnnnnnnnnnnnnnnnnnnnnnnnnnnnnnnnnnnnnnnnnnnnnnnnnnnnnnnnnnnnnnnnnnnnnnnnnnnnnnnnnnnnnnnnnnnnnnnnnnnnnnnnnnnnnnnnnnnnnnnnnnnnnnnnnnnnnnnnnnnnnnnnnnnnnnnnnnnnnnnnnnnnnnnnnnnnnnnnnnnnnnnnnnnnnnnnnnnnnnnnnnnnnnnnnnnnnnnnnnnnnnnnnnnnnnnnnnnnnnnnnnnnnnnnnnnnnnnnnnnnnnnnnnnnnnnnnnnnnnnnnnnnnnnnnnnnnnnnnnnnnnnnnnnnnnnnnnnnnnnnnnnnnnnnnnnnnnnnnnnnnnnnnnnnnnnnnnnnnnnnnnnnnnnnnnnnnnnnnnnnnnnnnnnnnnnnnnnnnnnnnnnnnnnnnnnnnnnnnnnnnnnnnnnnnnnnnnnnnnnnnnnnnnnnnnnnnnnnnnnnnnnnnnnnnnnnnnnnnnnnnnnnnnnnnnnnnnnnnnnnnnnnnnnnnnnnnnnnnnnnnnnnnnnnnnnnnnnnnnnnnnnnnnnnnnnnnnnnnnnnnnnnnnnnnnnnnnnnnnnnnnnnnnnnnnnnnnnnnnnnnnnnnnnnnnnnnnnnnnnnnnnnnnnnnnnnnnnnnnnnnnnnnnnnnnnnnnnnnnnnnnnnnnnnnnnnnnnnnnnnnnnnnnnnnnnnnnnnnnnnnnnnnnnnnnnnnnnnnnnnnnnnnnnnnnnnnnnnnnnnnnnnnnnnnnnnnnnnnnnnnnnnnnnnnnnnnnnnnnnnnnnnnnnnnnnnnnnnnnnnnnnnnnnnnnnnnnnnnnnnnnnnnnnnnnnnnnnnnnnnnnnnnnnnnnnnnnnnnnnnnnnnnnnnnnnnnnnnnnnnnnnnnnnnnnnnnnnnnnnnnnnnnnnnnnnnnnnnnnnnnnnnnnnnnnnnnnnnnnnnnnnnnnnnnnnnnnnnnnnnnnnnnnnnnnnnnnnnnnnnnnnnnnnnnnnnnnnnnnnnnnnnnnnnnnnnnnnnnnnnnnnnnnnnnnnnnnnnnnnnnnnnnnnnnnnnnnnnnnnnnnnnnnnnnnnnnnnnnnnnnnnnnnnnnnnnnnnnnnnnnnnnnnnnnnnnnnnnnnnnnnnnnnnnnnnnnnnnnnnnnnnnnnnnnnnnnnnnnnnnnnnnnnnnnnnnnnnnnnnnnnnnnnnnnnnnnnnnnnnnnnnnnnnnnnnnnnnnnnnnnnnnnnnnnnnnnnnnnnnnnnnnnnnnnnnnnnnnnnnnnnnnnnnnnnnnnnnnnnnnnnnnnnnnnnnnnnnnnnnnnnnnnnnnnnnnnnnnnnnnnnnnnnnnnnnnnnnnnnnnnnnnnnnnnnnnnnnnnnnnnnnnnnnnnnnnnnnnnnnnnnnnnnnnnnnnnnnnnnnnnnnnnnnnnnnnnnnnnnnnnnnnnnnnnnnnnnnnnnnnnnnnnnnnnnnnnnnnnnnnnnnnnnnnnnnnnnnnnnnnnnnnnnnnnnnnnnnnnnnnnnnnnnnnnnnnnnnnnnnnnnnnnnnnnnnnnnnnnnnnnnnnnnnnnnnnnnnnnnnnnnnnnnnnnnnnnnnnnnnnnnnnnnnnnnnnnnnnnnnnnnnnnnnnnnnnnnnnnnnnnnnnnnnnnnnnnnnnnnnnnnnnnnnnnnnnnnnnnnnnnnnnnnnnnnnnnnnnnnnnnnnnnnnnnnnnnnnnnnnnnnnnnnnnnnnnnnnnnnnnnnnnnnnnnnnnnnnnnnnnnnnnnnnnnnnnnnnnnnnnnnnnnnnnnnnnnnnnnnnnnnnnnnnnnnnnnnnnnnnnnnnnnnnnnnnnnnnnnnnnnnnnnnnnnnnnnnnnnnnnnnnnnnnnnnnnnnnnnnnnnnnnnnnnnnnnnnnnnnnnnnnnnnnnnnnnnnnnnnnnnnnnnnnnnnnnnnnnnnnnnnnnnnnnnnnnnnnnnnnnnnnnnnnnnnnnnnnnnnnnnnnnnnnnnnnnnnnnnnnnnnnnnnnnnnnnnnnnnnnnnnnnnnnnnnnnnnnnnnnnnnnnnnnnnnnnnnnnnnnnnnnnnnnnnnnnnnnnnnnnnnnnnnnnnnnnnnnnnnnnnnnnnnnnnnnnnnnnnnnnnnnnnnnnnnnnnnnnnnnnnnnnnnnnnnnnnnnnnnnnnnnnnnnnnnnnnnnnnnnnnnnnnnnnnnnnnnnnnnnnnnnnnnnnnnnnnnnnnnnnnnnnnnnnnnnnnnnnnnnnnnnnnnnnnnnnnnnnnnnnnnnnnnnnnnnnnnnnnnnnnnnnnnnnnnnnnnnnnnnnnnnnnnnnnnnnnnnnnnnnnnnnnnnnnnnnnnnnnnnnnnnnnnnnnnnnnnnnnnnnnnnnnnnnnnnnnnnnnnnnnnnnnnnnnnnnnnnnnnnnnnnnnnnnnnnnnnnnnnnnnnnnnnnnnnnnnnnnnnnnnnnnnnnnnnnnnnnnnnnnnnnnnnnnnnnnnnnnnnnnnnnnnnnnnnnnnnnnnnnnnnnnnnnnnnnnnnnnnnnnnnnnnnnnnnnnnnnnnnnnnnnnnnnnnnnnnnnnnnnnnnnnnnnnnnnnnnnnnnnnnnnnnnnnnnnnnnnnnnnnnnnnnnnnnnnnnnnnnnnnnnnnnnnnnnnnnnnnnnnnnnnnnnnnnnnnnnnnnnnnnnnnnnnnnnnnnnnnnnnnnnnnnnnnnnnnnnnnnnnnnnnnnnnnnnnnnnnnnnnnnnnnnnnnnnnnnnnnnnnnnnnnnnnnnnnnnnnnnnnnnnnnnnnnnnnnnnnnnnnnnnnnnnnnnnnnnnnnnnnnnnnnnnnnnnnnnnnnnnnnnnnnnnnnnnnnnnnnnnnnnnnnnnnnnnnnnnnnnnnnnnnnnnnnnnnnnnnnnnnnnnnnnnnnnnnnnnnnnnnnnnnnnnnnnnnnnnnnnnnnnnnnnnnnnnnnnnnnnnnnnnnnnnnnnnnnnnnnnnnnnnnnnnnnnnnnnnnnnnnnnnnnnnnnnnnnnnnnnnnnnnnnnnnnnnnnnnnnnnnnnnnnnnnnnnnnnnnnnnnnnnnnnnnnnnnnnnnnnnnnnnnnnnnnnnnnnnnnnnnnnnnnnnnnnnnnnnnnnnnnnnnnnnnnnnnnnnnnnnnnnnnnnnnnnnnnnnnnnnnnnnnnnnnnnnnnnnnnnnnnnnnnnnnnnnnnnnnnnnnnnnnnnnnnnnnnnnnnnnnnnnnnnnnnnnnnnnnnnnnnnnnnnnnnnnnnnnnnnnnnnnnnnnnnnnnnnnnnnnnnnnnnnnnnnnnnnnnnnnnnnnnnnnnnnnnnnnnnnnnnnnnnnnnnnnnnnnnnnnnnnnnnnnnnnnnnnnnnnnnnnnnnnnnnnnnnnnnnnnnnnnnnnnnnnnnnnnnnnnnnnnnnnnnnnnnnnnnnnnnnnnnnnnnnnnnnnnnnnnnnnnnnnnnnnnnnnnnnnnnnnnnnnnnnnnnnnnnnnnnnnnnnnnnnnnnnnnnnnnnnnnnnnnnnnnnnnnnnnnnnnnnnnnnnnnnnnnnnnnnnnnnnnnnnnnnnnnnnnnnnnnnnnnnnnnnnnnnnnnnnnnnnnnnnnnnnnnnnnnnnnnnnnnnnnnnnnnnnnnnnnnnnnnnnnnnnnnnnnnnnnnnnnnnnnnnnnnnnnnnnnnnnnnnnnnnnnnnnnnnnnnnnnnnnnnnnnnnnnnnnnnnnnnnnnnnnnnnnnnnnnnnnnnnnnnnnnnnnnnnnnnnnnnnnnnnnnnnnnnnnnnnnnnnnnnnnnnnnnnnnnnnnnnnnnnnnnnnnnnnnnnnnnnnnnnnnnnnnnnnnnnnnnnnnnnnnnnnnnnnnnnnnnnnnnnnnnnnnnnnnnnnnnnnnnnnnnnnnnnnnnnnnnnnnnnnnnnnnnnnnnnnnnnnnnnnnnnnnnnnnnnnnnnnnnnnnnnnnnnnnnnnnnnnnnnnnnnnnnnnnnnnnnnnnnnnnnnnnnnnnnnnnnnnnnnnnnnnnnnnnnnnnnnnnnnnnnnnnnnnnnnnnnnnnnnnnnnnnnnnnnnnnnnnnnnnnnnnnnnnnnnnnnnnnnnnnnnnnnnnnnnnnnnnnnnnnnnnnnnnnnnnnnnnnnnnnnnnnnnnnnnnnnnnnnnnnnnnnnnnnnnnnnnnnnnnnnnnnnnnnnnnnnnnnnnnnnnnnnnnnnnnnnnnnnnnnnnnnnnnnnnnnnnnnnnnnnnnnnnnnnnnnnnnnnnnnnnnnnnnnnnnnnnnnnnnnnnnnnnnnnnnnnnnnnnnnnnnnnnnnnnnnnnnnnnnnnnnnnnnnnnnnnnnnnnnnnnnnnnnnnnnnnnnnnnnnnnnnnnnnnnnnnnnnnnnnnnnnnnnnnnnnnnnnnnnnnnnnnnnnnnnnnnnnnnnnnnnnnnnnnnnnnnnnnnnnnnnnnnnnnnnnnnnnnnnnnnnnnnnnnnnnnnnnnnnnnnnnnnnnnnnnnnnnnnnnnnnnnnnnnnnnnnnnnnnnnnnnnnnnnnnnnnnnnnnnnnnnnnnnnnnnnnnnnnnnnnnnnnnnnnnnnnnnnnnnnnnnnnnnnnnnnnnnnnnnnnnnnnnnnnnnnnnnnnnnnnnnnnnnnnnnnnnnnnnnnnnnnnnnnnnnnnnnnnnnnnnnnnnnnnnnnnnnnnnnnnnnnnnnnnnnnnnnnnnnnnnnnnnnnnnnnnnnnnnnnnnnnnnnnnnnnnnnnnnnnnnnnnnnnnnnnnnnnnnnnnnnnnnnnnnnnnnnnnnnnnnnnnnnnnnnnnnnnnnnnnnnnnnnnnnnnnnnnnnnnnnnnnnnnnnnnnnnnnnnnnnnnnnnnnnnnnnnnnnnnnnnnnnnnnnnnnnnnnnnnnnnnnnnnnnnnnnnnnnnnnnnnnnnnnnnnnnnnnnnnnnnnnnnnnnnnnnnnnnnnnnnnnnnnnnnnnnnnnnnnnnnnnnnnnnnnnnnnnnnnnnnnnnnnnnnnnnnnnnnnnnnnnnnnnnnnnnnnnnnnnnnnnnnnnnnnnnnnnnnnnnnnnnnnnnnnnnnnnnnnnnnnnnnnnnnnnnnnnnnnnnnnnnnnnnnnnnnnnnnnnnnnnnnnnnnnnnnnnnnnnnnnnnnnnnnnnnnnnnnnnnnnnnnnnnnnnnnnnnnnnnnnnnnnnnnnnnnnnnnnnnnnnnnnnnnnnnnnnnnnnnnnnnnnnnnnnnnnnnnnnnnnnnnnnnnnnnnnnnnnnnnnnnnnnnnnnnnnnnnnnnnnnnnnnnnnnnnnnnnnnnnnnnnnnnnnnnnnnnnnnnnnnnnnnnnnnnnnnnnnnnnnnnnnnnnnnnnnnnnnnnnnnnnnnnnnnnnnnnnnnnnnnnnnnnnnnnnnnnnnnnnnnnnnnnnnnnnnnnnnnnnnnnnnnnnnnnnnnnnnnnnnnnnnnnnnnnnnnnnnnnnnnnnnnnnnnnnnnnnnnnnnnnnnnnnnnnnnnnnnnnnnnnnnnnnnnnnnnnnnnnnnnnnnnnnnnnnnnnnnnnnnnnnnnnnnnnnnnnnnnnnnnnnnnnnnnnnnnnnnnnnnnnnnnnnnnnnnnnnnnnnnnnnnnnnnnnnnnnnnnnnnnnnnnnnnnnnnnnnnnnnnnnnnnnnnnnnnnnnnnnnnnnnnnnnnnnnnnnnnnnnnnnnnnnnnnnnnnnnnnnnnnnnnnnnnnnnnnnnnnnnnnnnnnnnnnnnnnnnnnnnnnnnnnnnnnnnnnnnnnnnnnnnnnnnnnnnnnnnnnnnnnnnnnnnnnnnnnnnnnnnnnnnnnnnnnnnnnnnnnnnnnnnnnnnnnnnnnnnnnnnnnnnnnnnnnnnnnnnnnnnnnnnnnnnnnnnnnnnnnnnnnnnnnnnnnnnnnnnnnnnnnnnnnnnnnnnnnnnnnnnnnnnnnnnnnnnnnnnnnnnnnnnnnnnnnnnnnnnnnnnnnnnnnnnnnnnnnnnnnnnnnnnnnnnnnnnnnnnnnnnnnnnnnnnnnnnnnnnnnnnnnnnnnnnnnnnnnnnnnnnnnnnnnnnnnnnnnnnnnnnnnnnnnnnnnnnnnnnnnnnnnnnnnnnnnnnnnnnnnnnnnnnnnnnnnnnnnnnnnnnnnnnnnnnnnnnnnnnnnnnnnnnnnnnnnnnnnnnnnnnnnnnnnnnnnnnnnnnnnnnnnnnnnnnnnnnnnnnnnnnnnnnnnnnnnnnnnnnnnnnnnnnnnnnnnnnnnnnnnnnnnnnnnnnnnnnnnnnnnnnnnnnnnnnnnnnnnnnnnnnnnnnnnnnnnnnnnnnnnnnnnnnnnnnnnnnnnnnnnnnnnnnnnnnnnnnnnnnnnnnnnnnnnnnnnnnnnnnnnnnnnnnnnnnnnnnnnnnnnnnnnnnnnnnnnnnnnnnnnnnnnnnnnnnnnnnnnnnnnnnnnnnnnnnnnnnnnnnnnnnnnnnnnnnnnnnnnnnnnnnnnnnnnnnnnnnnnnnnnnnnnnnnnnnnnnnnnnnnnnnnnnnnnnnnnnnnnnnnnnnnnnnnnnnnnnnnnnnnnnnnnnnnnnnnnnnnnnnnnnnnnnnnnnnnnnnnnnnnnnnnnnnnnnnnnnnnnnnnnnnnnnnnnnnnnnnnnnnnnnnnnnnnnnnnnnnnnnnnnnnnnnnnnnnnnnnnnnnnnnnnnnnnnnnnnnnnnnnnnnnnnnnnnnnnnnnnnnnnnnnnnnnnnnnnnnnnnnnnnnnnnnnnnnnnnnnnnnnnnnnnnnnnnnnnnnnnnnnnnnnnnnnnnnnnnnnnnnnnnnnnnnnnnnnnnnnnnnnnnnnnnnnnnnnnnnnnnnnnnnnnnnnnnnnnnnnnnnnnnnnnnnnnnnnnnnnnnnnnnnnnnnnnnnnnnnnnnnnnnnnnnnnnnnnnnnnnnnnnnnnnnnnnnnnnnnnnnnnnnnnnnnnnnnnnnnnnnnnnnnnnnnnnnnnnnnnnnnnnnnnnnnnnnnnnnnnnnnnnnnnnnnnnnnnnnnnnnnnnnnnnnnnnnnnnnnnnnnnnnnnnnnnnnnnnnnnnnnnnnnnnnnnnnnnnnnnnnnnnnnnnnnnnnnnnnnnnnnnnnnnnnnnnnnnnnnnnnnnnnnnnnnnnnnnnnnnnnnnnnnnnnnnnnnnnnnnnnnnnnnnnnnnnnnnnnnnnnnnnnnnnnnnnnnnnnnnnnnnnnnnnnnnnnnnnnnnnnnnnnnnnnnnnnnnnnnnnnnnnnnnnnnnnnnnnnnnnnnnnnnnnnnnnnnnnnnnnnnnnnnnnnnnnnnnnnnnnnnnnnnnnnnnnnnnnnnnnnnnnnnnnnnnnnnnnnnnnnnnnnnnnnnnnnnnnnnnnnnnnnnnnnnnnnnnnnnnnnnnnnnnnnnnnnnnnnnnnnnnnnnnnnnnnnnnnnnnnnnnnnnnnnnnnnnnnnnnnnnnnnnnnnnnnnnnnnnnnnnnnnnnnnnnnnnnnnnnnnnnnnnnnnnnnnnnnnnnnnnnnnnnnnnnnnnnnnnnnnnnnnnnnnnnnnnnnnnnnnnnnnnnnnnnnnnnnnnnnnnnnnnnnnnnnnnnnnnnnnnnnnnnnnnnnnnnnnnnnnnnnnnnnnnnnnnnnnnnnnnnnnnnnnnnnnnnnnnnnnnnnnnnnnnnnnnnnnnnnnnnnnnnnnnnnnnnnnnnnnnnnnnnnnnnnnnnnnnnnnnnnnnnnnnnnnnnnnnnnnnnnnnnnnnnnnnnnnnnnnnnnnnnnnnnnnnnnnnnnnnnnnnnnnnnnnnnnnnnnnnnnnnnnnnnnnnnnnnnnnnnnnnnnnnnnnnnnnnnnnnnnnnnnnnnnnnnnnnnnnnnnnnnnnnnnnnnnnnnnnnnnnnnnnnnnnnnnnnnnnnnnnnnnnnnnnnnnnnnnnnnnnnnnnnnnnnnnnnnnnnnnnnnnnnnnnnnnnnnnnnnnnnnnnnnnnnnnnnnnnnnnnnnnnnnnnnnnnnnnnnnnnnnnnnnnnnnnnnnnnnnnnnnnnnnnnnnnnnnnnnnnnnnnnnnnnnnnnnnnnnnnnnnnnnnnnnnnnnnnnnnnnnnnnnnnnnnnnnnnnnnnnnnnnnnnnnnnnnnnnnnnnnnnnnnnnnnnnnnnnnnnnnnnnnnnnnnnnnnnnnnnnnnnnnnnnnnnnnnnnnnnnnnnnnnnnnnnnnnnnnnnnnnnnnnnnnnnnnnnnnnnnnnnnnnnnnnnnnnnnnnnnnnnnnnnnnnnnnnnnnnnnnnnnnnnnnnnnnnnnnnnnnnnnnnnnnnnnnnnnnnnnnnnnnnnnnnnnnnnnnnnnnnnnnnnnnnnnnnnnnnnnnnnnnnnnnnnnnnnnnnnnnnnnnnnnnnnnnnnnnnnnnnnnnnnnnnnnnnnnnnnnnnnnnnnnnnnnnnnnnnnnnnnnnnnnnnnnnnnnnnnnnnnnnnnnnnnnnnnnnnnnnnnnnnnnnnnnnnnnnnnnnnnnnnnnnnnnnnnnnnnnnnnnnnnnnnnnnnnnnnnnnnnnnnnnnnnnnnnnnnnnnnnnnnnnnnnnnnnnnnnnnnnnnnnnnnnnnnnnnnnnnnnnnnnnnnnnnnnnnnnnnnnnnnnnnnnnnnnnnnnnnnnnnnnnnnnnnnnnnnnnnnnnnnnnnnnnnnnnnnnnnnnnnnnnnnnnnnnnnnnnnnnnnnnnnnnnnnnnnnnnnnnnnnnnnnnnnnnnnnnnnnnnnnnnnnnnnnnnnnnnnnnnnnnnnnnnnnnnnnnnnnnnnnnnnnnnnnnnnnnnnnnnnnnnnnnnnnnnnnnnnnnnnnnnnnnnnnnnnnnnnnnnnnnnnnnnnnnnnnnnnnnnnnnnnnnnnnnnnnnnnnnnnnnnnnnnnnnnnnnnnnnnnnnnnnnnnnnnnnnnnnnnnnnnnnnnnnnnnnnnnnnnnnnnnnnnnnnnnnnnnnnnnnnnnnnnnnnnnnnnnnnnnnnnnnnnnnnnnnnnnnnnnnnnnnnnnnnnnnnnnnnnnnnnnnnnnnnnnnnnnnnnnnnnnnnnnnnnnnnnnnnnnnnnnnnnnnnnnnnnnnnnnnnnnnnnnnnnnnnnnnnnnnnnnnnnnnnnnnnnnnnnnnnnnnnnnnnnnnnnnnnnnnnnnnnnnnnnnnnnnnnnnnnnnnnnnnnnnnnnnnnnnnnnnnnnnnnnnnnnnnnnnnnnnnnnnnnnnnnnnnnnnnnnnnnnnnnnnnnnnnnnnnnnnnnnnnnnnnnnnnnnnnnnnnnnnnnnnnnnnnnnnnnnnnnnnnnnnnnnnnnnnnnnnnnnnnnnnnnnnnnnnnnnnnnnnnnnnnnnnnnnnnnnnnnnnnnnnnnnnnnnnnnnnnnnnnnnnnnnnnnnnnnnnnnnnnnnnnnnnnnnnnnnnnnnnnnnnnnnnnnnnnnnnnnnnnnnnnnnnnnnnnnnnnnnnnnnnnnnnnnnnnnnnnnnnnnnnnnnnnnnnnnnnnnnnnnnnnnnnnnnnnnnnnnnnnnnnnnnnnnnnnnnnnnnnnnnnnnnnnnnnnnnnnnnnnnnnnnnnnnnnnnnnnnnnnnnnnnnnnnnnnnnnnnnnnnnnnnnnnnnnnnnnnnnnnnnnnnnnnnnnnnnnnnnnnnnnnnnnnnnnnnnnnnnnnnnnnnnnnnnnnnnnnnnnnnnnnnnnnnnnnnnnnnnnnnnnnnnnnnnnnnnnnnnnnnnnnnnnnnnnnnnnnnnnnnnnnnnnnnnnnnnnnnnnnnnnnnnnnnnnnnnnnnnnnnnnnnnnnnnnnnnnnnnnnnnnnnnnnnnnnnnnnnnnnnnnnnnnnnnnnnnnnnnnnnnnnnnnnnnnnnnnnnnnnnnnnnnnnnnnnnnnnnnnnnnnnnnnnnnnnnnnnnnnnnnnnnnnnnnnnnnnnnnnnnnnnnnnnnnnnnnnnnnnnnnnnnnnnnnnnnnnnnnnnnnnnnnnnnnnnnnnnnnnnnnnnnnnnnnnnnnnnnnnnnnnnnnnnnnnnnnnnnnnnnnnnnnnnnnnnnnnnnnnnnnnnnnnnnnnnnnnnnnnnnnnnnnnnnnnnnnnnnnnnnnnnnnnnnnnnnnnnnnnnnnnnnnnnnnnnnnnnnnnnnnnnnnnnnnnnnnnnnnnnnnnnnnnnnnnnnnnnnnnnnnnnnnnnnnnnnnnnnnnnnnnnnnnnnnnnnnnnnnnnnnnnnnnnnnnnnnnnnnnnnnnnnnnnnnnnnnnnnnnnnnnnnnnnnnnnnnnnnnnnnnnnnnnnnnnnnnnnnnnnnnnnnnnnnnnnnnnnnnnnnnnnnnnnnnnnnnnnnnnnnnnnnnnnnnnnnnnnnnnnnnnnnnnnnnnnnnnnnnnnnnnnnnnnnnnnnnnnnnnnnnnnnnnnnnnnnnnnnnnnnnnnnnnnnnnnnnnnnnnnnnnnnnnnnnnnnnnnnnnnnnnnnnnnnnnnnnnnnnnnnnnnnnnnnnnnnnnnnnnnnnnnnnnnnnnnnnnnnnnnnnnnnnnnnnnnnnnnnnnnnnnnnnnnnnnnnnnnnnnnnnnnnnnnnnnnnnnnnnnnnnnnnnnnnnnnnnnnnnnnnnnnnnnnnnnnnnnnnnnnnnnnnnnnnnnnnnnnnnnnnnnnnnnnnnnnnnnnnnnnnnnnnnnnnnnnnnnnnnnnnnnnnnnnnnnnnnnnnnnnnnnnnnnnnnnnnnnnnnnnnnnnnnnnnnnnnnnnnnnnnnnnnnnnnnnnnnnnnnnnnnnnnnnnnnnnnnnnnnnnnnnnnnnnnnnnnnnnnnnnnnnnnnnnnnnnnnnnnnnnnnnnnnnnnnnnnnnnnnnnnnnnnnnnnnnnnnnnnnnnnnnnnnnnnnnnnnnnnnnnnnnnnnnnnnnnnnnnnnnnnnnnnnnnnnnnnnnnnnnnnnnnnnnnnnnnnnnnnnnnnnnnnnnnnnnnnnnnnnnnnnnnnnnnnnnnnnnnnnnnnnnnnnnnnnnnnnnnnnnnnnnnnnnnnnnnnnnnnnnnnnnnnnnnnnnnnnnnnnnnnnnnnnnnnnnnnnnnnnnnnnnnnnnnnnnnnnnnnnnnnnnnnnnnnnnnnnnnnnnnnnnnnnnnnnnnnnnnnnnnnnnnnnnnnnnnnnnnnnnnnnnnnnnnnnnnnnnnnnnnnnnnnnnnnnnnnnnnnnnnnnnnnnnnnnnnnnnnnnnnnnnnnnnnnnnnnnnnnnnnnnnnnnnnnnnnnnnnnnnnnnnnnnnnnnnnnnnnnnnnnnnnnnnnnnnnnnnnnnnnnnnnnnnnnnnnnnnnnnnnnnnnnnnnnnnnnnnnnnnnnnnnnnnnnnnnnnnnnnnnnnnnnnnnnnnnnnnnnnnnnnnnnnnnnnnnnnnnnnnnnnnnnnnnnnnnnnnnnnnnnnnnnnnnnnnnnnnnnnnnnnnnnnnnnnnnnnnnnnnnnnnnnnnnnnnnnnnnnnnnnnnnnnnnnnnnnnnnnnnnnnnnnnnnnnnnnnnnnnnnnnnnnnnnnnnnnnnnnnnnnnnnnnnnnnnnnnnnnnnnnnnnnnnnnnnnnnnnnnnnnnnnnnnnnnnnnnnnnnnnnnnnnnnnnnnnnnnnnnnnnnnnnnnnnnnnnnnnnnnnnnnnnnnnnnnnnnnnnnnnnnnnnnnnnnnnnnnnnnnnnnnnnnnnnnnnnnnnnnnnnnnnnnnnnnnnnnnnnnnnnnnnnnnnnnnnnnnnnnnnnnnnnnnnnnnnnnnnnnnnnnnnnnnnnnnnnnnnnnnnnnnnnnnnnnnnnnnnnnnnnnnnnnnnnnnnnnnnnnnnnnnnnnnnnnnnnnnnnnnnnnnnnnnnnnnnnnnnnnnnnnnnnnnnnnnnnnnnnnnnnnnnnnnnnnnnnnnnnnnnnnnnnnnnnnnnnnnnnnnnnnnnnnnnnnnnnnnnnnnnnnnnnnnnnnnnnnnnnnnnnnnnnnnnnnnnnnnnnnnnnnnnnnnnnnnnnnnnnnnnnnnnnnnnnnnnnnnnnnnnnnnnnnnnnnnnnnnnnnnnnnnnnnnnnnnnnnnnnnnnnnnnnnnnnnnnnnnnnnnnnnnnnnnnnnnnnnnnnnnnnnnnnnnnnnnnnnnnnnnnnnnnnnnnnnnnnnnnnnnnnnnnnnnnnnnnnnnnnnnnnnnnnnnnnnnnnnnnnnnnnnnnnnnnnnnnnnnnnnnnnnnnnnnnnnnnnnnnnnnnnnnnnnnnnnnnnnnnnnnnnnnnnnnnnnnnnnnnnnnnnnnnnnnnnnnnnnnnnnnnnnnnnnnnnnnnnnnnnnnnnnnnnnnnnnnnnnnnnnnnnnnnnnnnnnnnnnnnnnnnnnnnnnnnnnnnnnnnnnnnnnnnnnnnnnnnnnnnnnnnnnnnnnnnnnnnnnnnnnnnnnnnnnnnnnnnnnnnnnnnnnnnnnnnnnnnnnnnnnnnnnnnnnnnnnnnnnnnnnnnnnnnnnnnnnnnnnnnnnnnnnnnnnnnnnnnnnnnnnnnnnnnnnnnnnnnnnnnnnnnnnnnnnnnnnnnnnnnnnnnnnnnnnnnnnnnnnnnnnnnnnnnnnnnnnnnnnnnnnnnnnnnnnnnnnnnnnnnnnnnnnnnnnnnnnnnnnnnnnnnnnnnnnnnnnnnnnnnnnnnnnnnnnnnnnnnnnnnnnnnnnnnnnnnnnnnnnnnnnnnnnnnnnnnnnnnnnnnnnnnnnnnnnnnnnnnnnnnnnnnnnnnnnnnnnnnnnnnnnnnnnnnnnnnnnnnnnnnnnnnnnnnnnnnnnnnnnnnnnnnnnnnnnnnnnnnnnnnnnnnnnnnnnnnnnnnnnnnnnnnnnnnnnnnnnnnnnnnnnnnnnnnnnnnnnnnnnnnnnnnnnnnnnnnnnnnnnnnnnnnnnnnnnnnnnnnnnnnnnnnnnnnnnnnnnnnnnnnnnnnnnnnnnnnnnnnnnnnnnnnnnnnnnnnnnnnnnnnnnnnnnnnnnnnnnnnnnnnnnnnnnnnnnnnnnnnnnnnnnnnnnnnnnnnnnnnnnnnnnnnnnnnnnnnnnnnnnnnnnnnnnnnnnnnnnnnnnnnnnnnnnnnnnnnnnnnnnnnnnnnnnnnnnnnnnnnnnnnnnnnnnnnnnnnnnnnnnnnnnnnnnnnnnnnnnnnnnnnnnnnnnnnnnnnnnnnnnnnnnnnnnnnnnnnnnnnnnnnnnnnnnnnnnnnnnnnnnnnnnnnnnnnnnnnnnnnnnnnnnnnnnnnnnnnnnnnnnnnnnnnnnnnnnnnnnnnnnnnnnnnnnnnnnnnnnnnnnnnnnnnnnnnnnnnnnnnnnnnnnnnnnnnnnnnnnnnnnnnnnnnnnnnnnnnnnnnnnnnnnnnnnnnnnnnnnnnnnnnnnnnnnnnnnnnnnnnnnnnnnnnnnnnnnnnnnnnnnnnnnnnnnnnnnnnnnnnnnnnnnnnnnnnnnnnnnnnnnnnnnnnnnnnnnnnnnnnnnnnnnnnnnnnnnnnnnnnnnnnnnnnnnnnnnnnnnnnnnnnnnnnnnnnnnnnnnnnnnnnnnnnnnnnnnnnnnnnnnnnnnnnnnnnnnnnnnnnnnnnnnnnnnnnnnnnnnnnnnnnnnnnnnnnnnnnnnnnnnnnnnnnnnnnnnnnnnnnnnnnnnnnnnnnnnnnnnnnnnnnnnnnnnnnnnnnnnnnnnnnnnnnnnnnnnnnnnnnnnnnnnnnnnnnnnnnnnnnnnnnnnnnnnnnnnnnnnnnnnnnnnnnnnnnnnnnnnnnnnnnnnnnnnnnnnnnnnnnnnnnnnnnnnnnnnnnnnnnnnnnnnnnnnnnnnnnnnnnnnnnnnnnnnnnnnnnnnnnnnnnnnnnnnnnnnnnnnnnnnnnnnnnnnnnnnnnnnnnnnnnnnnnnnnnnnnnnnnnnnnnnnnnnnnnnnnnnnnnnnnnnnnnnnnnnnnnnnnnnnnnnnnnnnnnnnnnnnnnnnnnnnnnnnnnnnnnnnnnnnnnnnnnnnnnnnnnnnnnnnnnnnnnnnnnnnnnnnnnnnnnnnnnnnnnnnnnnnnnnnnnnnnnnnnnnnnnnnnnnnnnnnnnnnnnnnnnnnnnnnnnnnnnnnnnnnnnnnnnnnnnnnnnnnnnnnnnnnnnnnnnnnnnnnnnnnnnnnnnnnnnnnnnnnnnnnnnnnnnnnnnnnnnnnnnnnnnnnnnnnnnnnnnnnnnnnnnnnnnnnnnnnnnnnnnnnnnnnnnnnnnnnnnnnnnnnnnnnnnnnnnnnnnnnnnnnnnnnnnnnnnnnnnnnnnnnnnnnnnnnnnnnnnnnnnnnnnnnnnnnnnnnnnnnnnnnnnnnnnnnnnnnnnnnnnnnnnnnnnnnnnnnnnnnnnnnnnnnnnnnnnnnnnnnnnnnnnnnnnnnnnnnnnnnnnnnnnnnnnnnnnnnnnnnnnnnnnnnnnnnnnnnnnnnnnnnnnnnnnnnnnnnnnnnnnnnnnnnnnnnnnnnnnnnnnnnnnnnnnnnnnnnnnnnnnnnnnnnnnnnnnnnnnnnnnnnnnnnnnnnnnnnnnnnnnnnnnnnnnnnnnnnnnnnnnnnnnnnnnnnnnnnnnnnnnnnnnnnnnnnnnnnnnnnnnnnnnnnnnnnnnnnnnnnnnnnnnnnnnnnnnnnnnnnnnnnnnnnnnnnnnnnnnnnnnnnnnnnnnnnnnnnnnnnnnnnnnnnnnnnnnnnnnnnnnnnnnnnnnnnnnnnnnnnnnnnnnnnnnnnnnnnnnnnnnnnnnnnnnnnnnnnnnnnnnnnnnnnnnnnnnnnnnnnnnnnnnnnnnnnnnnnnnnnnnnnnnnnnnnnnnnnnnnnnnnnnnnnnnnnnnnnnnnnnnnnnnnnnnnnnnnnnnnnnnnnnnnnnnnnnnnnnnnnnnnnnnnnnnnnnnnnnnnnnnnnnnnnnnnnnnnnnnnnnnnnnnnnnnnnnnnnnnnnnnnnnnnnnnnnnnnnnnnnnnnnnnnnnnnnnnnnnnnnnnnnnnnnnnnnnnnnnnnnnnnnnnnnnnnnnnnnnnnnnnnnnnnnnnnnnnnnnnnnnnnnnnnnnnnnnnnnnnnnnnnnnnnnnnnnnnnnnnnnnnnnnnnnnnnnnnnnnnnnnnnnnnnnnnnnnnnnnnnnnnnnnnnnnnnnnnnnnnnnnnnnnnnnnnnnnnnnnnnnnnnnnnnnnnnnnnnnnnnnnnnnnnnnnnnnnnnnnnnnnnnnnnnnnnnnnnnnnnnnnnnnnnnnnnnnnnnnnnnnnnnnnnnnnnnnnnnnnnnnnnnnnnnnnnnnnnnnnnnnnnnnnnnnnnnnnnnnnnnnnnnnnnnnnnnnnnnnnnnnnnnnnnnnnnnnnnnnnnnnnnnnnnnnnnnnnnnnnnnnnnnnnnnnnnnnnnnnnnnnnnnnnnnnnnnnnnnnnnnnnnnnnnnnnnnnnnnnnnnnnnnnnnnnnnnnnnnnnnnnnnnnnnnnnnnnnnnnnnnnnnnnnnnnnnnnnnnnnnnnnnnnnnnnnnnnnnnnnnnnnnnnnnnnnnnnnnnnnnnnnnnnnnnnnnnnnnnnnnnnnnnnnnnnnnnnnnnnnnnnnnnnnnnnnnnnnnnnnnnnnnnnnnnnnnnnnnnnnnnnnnnnnnnnnnnnnnnnnnnnnnnnnnnnnnnnnnnnnnnnnnnnnnnnnnnnnnnnnnnnnnnnnnnnnnnnnnnnnnnnnnnnnnnnnnnnnnnnnnnnnnnnnnnnnnnnnnnnnnnnnnnnnnnnnnnnnnnnnnnnnnnnnnnnnnnnnnnnnnnnnnnnnnnnnnnnnnnnnnnnnnnnnnnnnnnnnnnnnnnnnnnnnnnnnnnnnnnnnnnnnnnnnnnnnnnnnnnnnnnnnnnnnnnnnnnnnnnnnnnnnnnnnnnnnnnnnnnnnnnnnnnnnnnnnnnnnnnnnnnnnnnnnnnnnnnnnnnnnnnnnnnnnnnnnnnnnnnnnnnnnnnnnnnnnnnnnnnnnnnnnnnnnnnnnnnnnnnnnnnnnnnnnnnnnnnnnnnnnnnnnnnnnnnnnnnnnnnnnnnnnnnnnnnnnnnnnnnnnnnnnnnnnnnnnnnnnnnnnnnnnnnnnnnnnnnnnnnnnnnnnnnnnnnnnnnnnnnnnnnnnnnnnnnnnnnnnnnnnnnnnnnnnnnnnnnnnnnnnnnnnnnnnnnnnnnnnnnnnnnnnnnnnnnnnnnnnnnnnnnnnnnnnnnnnnnnnnnnnnnnnnnnnnnnnnnnnnnnnnnnnnnnnnnnnnnnnnnnnnnnnnnnnnnnnnnnnnnnnnnnnnnnnnnnnnnnnnnnnnnnnnnnnnnnnnnnnnnnnnnnnnnnnnnnnnnnnnnnnnnnnnnnnnnnnnnnnnnnnnnnnnnnnnnnnnnnnnnnnnnnnnnnnnnnnnnnnnnnnnnnnnnnnnnnnnnnnnnnnnnnnnnnnnnnnnnnnnnnnnnnnnnnnnnnnnnnnnnnnnnnnnnnnnnnnnnnnnnnnnnnnnnnnnnnnnnnnnnnnnnnnnnnnnnnnnnnnnnnnnnnnnnnnnnnnnnnnnnnnnnnnnnnnnnnnnnnnnnnnnnnnnnnnnnnnnnnnnnnnnnnnnnnnnnnnnnnnnnnnnnnnnnnnnnnnnnnnnnnnnnnnnnnnnnnnnnnnnnnnnnnnnnnnnnnnnnnnnnnnnnnnnnnnnnnnnnnnnnnnnnnnnnnnnnnnnnnnnnnnnnnnnnnnnnnnnnnnnnnnnnnnnnnnnnnnnnnnnnnnnnnnnnnnnnnnnnnnnnnnnnnnnnnnnnnnnnnnnnnnnnnnnnnnnnnnnnnnnnnnnnnnnnnnnnnnnnnnnnnnnnnnnnnnnnnnnnnnnnnnnnnnnnnnnnnnnnnnnnnnnnnnnnnnnnnnnnnnnnnnnnnnnnnnnnnnnnnnnnnnnnnnnnnnnnnnnnnnnnnnnnnnnnnnnnnnnnnnnnnnnnnnnnnnnnnnnnnnnnnnnnnnnnnnnnnnnnnnnnnnnnnnnnnnnnnnnnnnnnnnnnnnnnnnnnnnnnnnnnnnnnnnnnnnnnnnnnnnnnnnnnnnnnnnnnnnnnnnnnnnnnnnnnnnnnnnnnnnnnnnnnnnnnnnnnnnnnnnnnnnnnnnnnnnnnnnnnnnnnnnnnnnnnnnnnnnnnnnnnnnnnnnnnnnnnnnnnnnnnnnnnnnnnnnnnnnnnnnnnnnnnnnnnnnnnnnnnnnnnnnnnnnnnnnnnnnnnnnnnnnnnnnnnnnnnnnnnnnnnnnnnnnnnnnnnnnnnnnnnnnnnnnnnnnnnnnnnnnnnnnnnnnnnnnnnnnnnnnnnnnnnnnnnnnnnnnnnnnnnnnnnnnnnnnnnnnnnnnnnnnnnnnnnnnnnnnnnnnnnnnnnnnnnnnnnnnnnnnnnnnnnnnnnnnnnnnnnnnnnnnnnnnnnnnnnnnnnnnnnnnnnnnnnnnnnnnnnnnnnnnnnnnnnnnnnnnnnnnnnnnnnnnnnnnnnnnnnnnnnnnnnnnnnnnnnnnnnnnnnnnnnnnnnnnnnnnnnnnnnnnnnnnnnnnnnnnnnnnnnnnnnnnnnnnnnnnnnnnnnnnnnnnnnnnnnnnnnnnnnnnnnnnnnnnnnnnnnnnnnnnnnnnnnnnnnnnnnnnnnnnnnnnnnnnnnnnnnnnnnnnnnnnnnnnnnnnnnnnnnnnnnnnnnnnnnnnnnnnnnnnnnnnnnnnnnnnnnnnnnnnnnnnnnnnnnnnnnnnnnnnnnnnnnnnnnnnnnnnnnnnnnnnnnnnnnnnnnnnnnnnnnnnnnnnnnnnnnnnnnnnnnnnnnnnnnnnnnnnnnnnnnnnnnnnnnnnnnnnnnnnnnnnnnnnnnnnnnnnnnnnnnnnnnnnnnnnnnnnnnnnnnnnnnnnnnnnnnnnnnnnnnnnnnnnnnnnnnnnnnnnnnnnnnnnnnnnnnnnnnnnnnnnnnnnnnnnnnnnnnnnnnnnnnnnnnnnnnnnnnnnnnnnnnnnnnnnnnnnnnnnnnnnnnnnnnnnnnnnnnnnnnnnnnnnnnnnnnnnnnnnnnnnnnnnnnnnnnnnnnnnnnnnnnnnnnnnnnnnnnnnnnnnnnnnnnnnnnnnnnnnnnnnnnnnnnnnnnnnnnnnnnnnnnnnnnnnnnnnnnnnnnnnnnnnnnnnnnnnnnnnnnnnnnnnnnnnnnnnnnnnnnnnnnnnnnnnnnnnnnnnnnnnnnnnnnnnnnnnnnnnnnnnnnnnnnnnnnnnnnnnnnnnnnnnnnnnnnnnnnnnnnnnnnnnnnnnnnnnnnnnnnnnnnnnnnnnnnnnnnnnnnnnnnnnnnnnnnnnnnnnnnnnnnnnnnnnnnnnnnnnnnnnnnnnnnnnnnnnnnnnnnnnnnnnnnnnnnnnnnnnnnnnnnnnnnnnnnnnnnnnnnnnnnnnnnnnnnnnnnnnnnnnnnnnnnnnnnnnnnnnnnnnnnnnnnnnnnnnnnnnnnnnnnnnnnnnnnnnnnnnnnnnnnnnnnnnnnnnnnnnnnnnnnnnnnnnnnnnnnnnnnnnnnnnnnnnnnnnnnnnnnnnnnnnnnnnnnnnnnnnnnnnnnnnnnnnnnnnnnnnnnnnnnnnnnnnnnnnnnnnnnnnnnnnnnnnnnnnnnnnnnnnnnnnnnnnnnnnnnnnnnnnnnnnnnnnnnnnnnnnnnnnnnnnnnnnnnnnnnnnnnnnnnnnnnnnnnnnnnnnnnnnnnnnnnnnnnnnnnnnnnnnnnnnnnnnnnnnnnnnnnnnnnnnnnnnnnnnnnnnnnnnnnnnnnnnnnnnnnnnnnnnnnnnnnnnnnnnnnnnnnnnnnnnnnnnnnnnnnnnnnnnnnnnnnnnnnnnnnnnnnnnnnnnnnnnnnnnnnnnnnnnnnnnnnnnnnnnnnnnnnnnnnnnnnnnnnnnnnnnnnnnnnnnnnnnnnnnnnnnnnnnnnnnnnnnnnnnnnnnnnnnnnnnnnnnnnnnnnnnnnnnnnnnnnnnnnnnnnnnnnnnnnnnnnnnnnnnnnnnnnnnnnnnnnnnnnnnnnnnnnnnnnnnnnnnnnnnnnnnnnnnnnnnnnnnnnnnnnnnnnnnnnnnnnnnnnnnnnnnnnnnnnnnnnnnnnnnnnnnnnnnnnnnnnnnnnnnnnnnnnnnnnnnnnnnnnnnnnnnnnnnnnnnnnnnnnnnnnnnnnnnnnnnnnnnnnnnnnnnnnnnnnnnnnnnnnnnnnnnnnnnnnnnnnnnnnnnnnnnnnnnnnnnnnnnnnnnnnnnnnnnnnnnnnnnnnnnnnnnnnnnnnnnnnnnnnnnnnnnnnnnnnnnnnnnnnnnnnnnnnnnnnnnnnnnnnnnnnnnnnnnnnnnnnnnnnnnnnnnnnnnnnnnnnnnnnnnnnnnnnnnnnnnnnnnnnnnnnnnnnnnnnnnnnnnnnnnnnnnnnnnnnnnnnnnnnnnnnnnnnnnnnnnnnnnnnnnnnnnnnnnnnnnnnnnnnnnnnnnnnnnnnnnnnnnnnnnnnnnnnnnnnnnnnnnnnnnnnnnnnnnnnnnnnnnnnnnnnnnnnnnnnnnnnnnnnnnnnnnnnnnnnnnnnnnnnnnnnnnnnnnnnnnnnnnnnnnnnnnnnnnnnnnnnnnnnnnnnnnnnnnnnnnnnnnnnnnnnnnnnnnnnnnnnnnnnnnnnnnnnnnnnnnnnnnnnnnnnnnnnnnnnnnnnnnnnnnnnnnnnnnnnnnnnnnnnnnnnnnnnnnnnnnnnnnnnnnnnnnnnnnnnnnnnnnnnnnnnnnnnnnnnnnnnnnnnnnnnnnnnnnnnnnnnnnnnnnnnnnnnnnnnnnnnnnnnnnnnnnnnnnnnnnnnnnnnnnnnnnnnnnnnnnnnnnnnnnnnnnnnnnnnnnnnnnnnnnnnnnnnnnnnnnnnnnnnnnnnnnnnnnnnnnnnnnnnnnnnnnnnnnnnnnnnnnnnnnnnnnnnnnnnnnnnnnnnnnnnnnnnnnnnnnnnnnnnnnnnnnnnnnnnnnnnnnnnnnnnnnnnnnnnnnnnnnnnnnnnnnnnnnnnnnnnnnnnnnnnnnnnnnnnnnnnnnnnnnnnnnnnnnnnnnnnnnnnnnnnnnnnnnnnnnnnnnnnnnnnnnnnnnnnnnnnnnnnnnnnnnnnnnnnnnnnnnnnnnnnnnnnnnnnnnnnnnnnnnnnnnnnnnnnnnnnnnnnnnnnnnnnnnnnnnnnnnnnnnnnnnnnnnnnnnnnnnnnnnnnnnnnnnnnnnnnnnnnnnnnnnnnnnnnnnnnnnnnnnnnnnnnnnnnnnnnnnnnnnnnnnnnnnnnnnnnnnnnnnnnnnnnnnnnnnnnnnnnnnnnnnnnnnnnnnnnnnnnnnnnnnnnnnnnnnnnnnnnnnnnnnnnnnnnnnnnnnnnnnnnnnnnnnnnnnnnnnnnnnnnnnnnnnnnnnnnnnnnnnnnnnnnnnnnnnnnnnnnnnnnnnnnnnnnnnnnnnnnnnnnnnnnnnnnnnnnnnnnnnnnnnnnnnnnnnnnnnnnnnnnnnnnnnnnnnnnnnnnnnnnnnnnnnnnnnnnnnnnnnnnnnnnnnnnnnnnnnnnnnnnnnnnnnnnnnnnnnnnnnnnnnnnnnnnnnnnnnnnnnnnnnnnnnnnnnnnnnnnnnnnnnnnnnnnnnnnnnnnnnnnnnnnnnnnnnnnnnnnnnnnnnnnnnnnnnnnnnnnnnnnnnnnnnnnnnnnnnnnnnnnnnnnnnnnnnnnnnnnnnnnnnnnnnnnnnnnnnnnnnnnnnnnnnnnnnnnnnnnnnnnnnnnnnnnnnnnnnnnnnnnnnnnnnnnnnnnnnnnnnnnnnnnnnnnnnnnnnnnnnnnnnnnnnnnnnnnnnnnnnnnnnnnnnnnnnnnnnnnnnnnnnnnnnnnnnnnnnnnnnnnnnnnnnnnnnnnnnnnnnnnnnnnnnnnnnnnnnnnnnnnnnnnnnnnnnnnnnnnnnnnnnnnnnnnnnnnnnnnnnnnnnnnnnnnnnnnnnnnnnnnnnnnnnnnnnnnnnnnnnnnnnnnnnnnnnnnnnnnnnnnnnnnnnnnnnnnnnnnnnnnnnnnnnnnnnnnnnnnnnnnnnnnnnnnnnnnnnnnnnnnnnnnnnnnnnnnnnnnnnnnnnnnnnnnnnnnnnnnnnnnnnnnnnnnnnnnnnnnnnnnnnnnnnnnnnnnnnnnnnnnnnnnnnnnnnnnnnnnnnnnnnnnnnnnnnnnnnnnnnnnnnnnnnnnnnnnnnnnnnnnnnnnnnnnnnnnnnnnnnnnnnnnnnnnnnnnnnnnnnnnnnnnnnnnnnnnnnnnnnnnnnnnnnnnnnnnnnnnnnnnnnnnnnnnnnnnnnnnnnnnnnnnnnnnnnnnnnnnnnnnnnnnnnnnnnnnnnnnnnnnnnnnnnnnnnnnnnnnnnnnnnnnnnnnnnnnnnnnnnnnnnnnnnnnnnnnnnnnnnnnnnnnnnnnnnnnnnnnnnnnnnnnnnnnnnnnnnnnnnnnnnnnnnnnnnnnnnnnnnnnnnnnnnnnnnnnnnnnnnnnnnnnnnnnnnnnnnnnnnnnnnnnnnnnnnnnnnnnnnnnnnnnnnnnnnnnnnnnnnnnnnnnnnnnnnnnnnnnnnnnnnnnnnnnnnnnnnnnnnnnnnnnnnnnnnnnnnnnnnnnnnnnnnnnnnnnnnnnnnnnnnnnnnnnnnnnnnnnnnnnnnnnnnnnnnnnnnnnnnnnnnnnnnnnnnnnnnnnnnnnnnnnnnnnnnnnnnnnnnnnnnnnnnnnnnnnnnnnnnnnnnnnnnnnnnnnnnnnnnnnnnnnnnnnnnnnnnnnnnnnnnnnnnnnnnnnnnnnnnnnnnnnnnnnnnnnnnnnnnnnnnnnnnnnnnnnnnnnnnnnnnnnnnnnnnnnnnnnnnnnnnnnnnnnnnnnnnnnnnnnnnnnnnnnnnnnnnnnnnnnnnnnnnnnnnnnnnnnnnnnnnnnnnnnnnnnnnnnnnnnnnnnnnnnnnnnnnnnnnnnnnnnnnnnnnnnnnnnnnnnnnnnnnnnnnnnnnnnnnnnnnnnnnnnnnnnnnnnnnnnnnnnnnnnnnnnnnnnnnnnnnnnnnnnnnnnnnnnnnnnnnnnnnnnnnnnnnnnnnnnnnnnnnnnnnnnnnnnnnnnnnnnnnnnnnnnnnnnnnnnnnnnnnnnnnnnnnnnnnnnnnnnnnnnnnnnnnnnnnnnnnnnnnnnnnnnnnnnnnnnnnnnnnnnnnnnnnnnnnnnnnnnnnnnnnnnnnnnnnnnnnnnnnnnnnnnnnnnnnnnnnnnnnnnnnnnnnnnnnnnnnnnnnnnnnnnnnnnnnnnnnnnnnnnnnnnnnnnnnnnnnnnnnnnnnnnnnnnnnnnnnnnnnnnnnnnnnnnnnnnnnnnnnnnnnnnnnnnnnnnnnnnnnnnnnnnnnnnnnnnnnnnnnnnnnnnnnnnnnnnnnnnnnnnnnnnnnnnnnnnnnnnnnnnnnnnnnnnnnnnnnnnnnnnnnnnnnnnnnnnnnnnnnnnnnnnnnnnnnnnnnnnnnnnnnnnnnnnnnnnnnnnnnnnnnnnnnnnnnnnnnnnnnnnnnnnnnnnnnnnnnnnnnnnnnnnnnnnnnnnnnnnnnnnnnnnnnnnnnnnnnnnnnnnnnnnnnnnnnnnnnnnnnnnnnnnnnnnnnnnnnnnnnnnnnnnnnnnnnnnnnnnnnnnnnnnnnnnnnnnnnnnnnnnnnnnnnnnnnnnnnnnnnnnnnnnnnnnnnnnnnnnnnnnnnnnnnnnnnnnnnnnnnnnnnnnnnnnnnnnnnnnnnnnnnnnnnnnnnnnnnnnnnnnnnnnnnnnnnnnnnnnnnnnnnnnnnnnnnnnnnnnnnnnnnnnnnnnnnnnnnnnnnnnnnnnnnnnnnnnnnnnnnnnnnnnnnnnnnnnnnnnnnnnnnnnnnnnnnnnnnnnnnnnnnnnnnnnnnnnnnnnnnnnnnnnnnnnnnnnnnnnnnnnnnnnnnnnnnnnnnnnnnnnnnnnnnnnnnnnnnnnnnnnnnnnnnnnnnnnnnnnnnnnnnnnnnnnnnnnnnnnnnnnnnnnnnnnnnnnnnnnnnnnnnnnnnnnnnnnnnnnnnnnnnnnnnnnnnnnnnnnnnnnnnnnnnnnnnnnnnnnnnnnnnnnnnnnnnnnnnnnnnnnnnnnnnnnnnnnnnnnnnnnnnnnnnnnnnnnnnnnnnnnnnnnnnnnnnnnnnnnnnnnnnnnnnnnnnnnnnnnnnnnnnnnnnnnnnnnnnnnnnnnnnnnnnnnnnnnnnnnnnnnnnnnnnnnnnnnnnnnnnnnnnnnnnnnnnnnnnnnnnnnnnnnnnnnnnnnnnnnnnnnnnnnnnnnnnnnnnnnnnnnnnnnnnnnnnnnnnnnnnnnnnnnnnnnnnnnnnnnnnnnnnnnnnnnnnnnnnnnnnnnnnnnnnnnnnnnnnnnnnnnnnnnnnnnnnnnnnnnnnnnnnnnnnnnnnnnnnnnnnnnnnnnnnnnnnnnnnnnnnnnnnnnnnnnnnnnnnnnnnnnnnnnnnnnnnnnnnnnnnnnnnnnnnnnnnnnnnnnnnnnnnnnnnnnnnnnnnnnnnnnnnnnnnnnnnnnnnnnnnnnnnnnnnnnnnnnnnnnnnnnnnnnnnnnnnnnnnnnnnnnnnnnnnnnnnnnnnnnnnnnnnnnnnnnnnnnnnnnnnnnnnnnnnnnnnnnnnnnnnnnnnnnnnnnnnnnnnnnnnnnnnnnnnnnnnnnnnnnnnnnnnnnnnnnnnnnnnnnnnnnnnnnnnnnnnnnnnnnnnnnnnnnnnnnnnnnnnnnnnnnnnnnnnnnnnnnnnnnnnnnnnnnnnnnnnnnnnnnnnnnnnnnnnnnnnnnnnnnnnnnnnnnnnnnnnnnnnnnnnnnnnnnnnnnnnnnnnnnnnnnnnnnnnnnnnnnnnnnnnnnnnnnnnnnnnnnnnnnnnnnnnnnnnnnnnnnnnnnnnnnnnnnnnnnnnnnnnnnnnnnnnnnnnnnnnnnnnnnnnnnnnnnnnnnnnnnnnnnnnnnnnnnnnnnnnnnnnnnnnnnnnnnnnnnnnnnnnnnnnnnnnnnnnnnnnnnnnnnnnnnnnnnnnnnnnnnnnnnnnnnnnnnnnnnnnnnnnnnnnnnnnnnnnnnnnnnnnnnnnnnnnnnnnnnnnnnnnnnnnnnnnnnnnnnnnnnnnnnnnnnnnnnnnnnnnnnnnnnnnnnnnnnnnnnnnnnnnnnnnnnnnnnnnnnnnnnnnnnnnnnnnnnnnnnnnnnnnnnnnnnnnnnnnnnnnnnnnnnnnnnnnnnnnnnnnnnnnnnnnnnnnnnnnnnnnnnnnnnnnnnnnnnnnnnnnnnnnnnnnnnnnnnnnnnnnnnnnnnnnnnnnnnnnnnnnnnnnnnnnnnnnnnnnnnnnnnnnnnnnnnnnnnnnnnnnnnnnnnnnnnnnnnnnnnnnnnnnnnnnnnnnnnnnnnnnnnnnnnnnnnnnnnnnnnnnnnnnnnnnnnnnnnnnnnnnnnnnnnnnnnnnnnnnnnnnnnnnnnnnnnnnnnnnnnnnnnnnnnnnnnnnnnnnnnnnnnnnnnnnnnnnnnnnnnnnnnnnnnnnnnnnnnnnnnnnnnnnnnnnnnnnnnnnnnnnnnnnnnnnnnnnnnnnnnnnnnnnnnnnnnnnnnnnnnnnnnnnnnnnnnnnnnnnnnnnnnnnnnnnnnnnnnnnnnnnnnnnnnnnnnnnnnnnnnnnnnnnnnnnnnnnnnnnnnnnnnnnnnnnnnnnnnnnnnnnnnnnnnnnnnnnnnnnnnnnnnnnnnnnnnnnnnnnnnnnnnnnnnnnnnnnnnnnnnnnnnnnnnnnnnnnnnnnnnnnnnnnnnnnnnnnnnnnnnnnnnnnnnnnnnnnnnnnnnnnnnnnnnnnnnnnnnnnnnnnnnnnnnnnnnnnnnnnnnnnnnnnnnnnnnnnnnnnnnnnnnnnnnnnnnnnnnnnnnnnnnnnnnnnnnnnnnnnnnnnnnnnnnnnnnnnnnnnnnnnnnnnnnnnnnnnnnnnnnnnnnnnnnnnnnnnnnnnnnnnnnnnnnnnnnnnnnnnnnnnnnnnnnnnnnnnnnnnnnnnnnnnnnnnnnnnnnnnnnnnnnnnnnnnnnnnnnnnnnnnnnnnnnnnnnnnnnnnnnnnnnnnnnnnnnnnnnnnnnnnnnnnnnnnnnnnnnnnnnnnnnnnnnnnnnnnnnnnnnnnnnnnnnnnnnnnnnnnnnnnnnnnnnnnnnnnnnnnnnnnnnnnnnnnnnnnnnnnnnnnnnnnnnnnnnnnnnnnnnnnnnnnnnnnnnnnnnnnnnnnnnnnnnnnnnnnnnnnnnnnnnnnnnnnnnnnnnnnnnnnnnnnnnnnnnnnnnnnnnnnnnnnnnnnnnnnnnnnnnnnnnnnnnnnnnnnnnnnnnnnnnnnnnnnnnnnnnnnnnnnnnnnnnnnnnnnnnnnnnnnnnnnnnnnnnnnnnnnnnnnnnnnnnnnnnnnnnnnnnnnnnnnnnnnnnnnnnnnnnnnnnnnnnnnnnnnnnnnnnnnnnnnnnnnnnnnnnnnnnnnnnnnnnnnnnnnnnnnnnnnnnnnnnnnnnnnnnnnnnnnnnnnnnnnnnnnnnnnnnnnnnnnnnnnnnnnnnnnnnnnnnnnnnnnnnnnnnnnnnnnnnnnnnnnnnnnnnnnnnnnnnnnnnnnnnnnnnnnnnnnnnnnnnnnnnnnnnnnnnnnnnnnnnnnnnnnnnnnnnnnnnnnnnnnnnnnnnnnnnnnnnnnnnnnnnnnnnnnnnnnnnnnnnnnnnnnnnnnnnnnnnnnnnnnnnnnnnnnnnnnnnnnnnnnnnnnnnnnnnnnnnnnnnnnnnnnnnnnnnnnnnnnnnnnnnnnnnnnnnnnnnnnnnnnnnnnnnnnnnnnnnnnnnnnnnnnnnnnnnnnnnnnnnnnnnnnnnnnnnnnnnnnnnnnnnnnnnnnnnnnnnnnnnnnnnnnnnnnnnnnnnnnnnnnnnnnnnnnnnnnnnnnnnnnnnnnnnnnnnnnnnnnnnnnnnnnnnnnnnnnnnnnnnnnnnnnnnnnnnnnnnnnnnnnnnnnnnnnnnnnnnnnnnnnnnnnnnnnnnnnnnnnnnnnnnnnnnnnnnnnnnnnnnnnnnnnnnnnnnnnnnnnnnnnnnnnnnnnnnnnnnnnnnnnnnnnnnnnnnnnnnnnnnnnnnnnnnnnnnnnnnnnnnnnnnnnnnnnnnnnnnnnnnnnnnnnnnnnnnnnnnnnnnnnnnnnnnnnnnnnnnnnnnnnnnnnnnnnnnnnnnnnnnnnnnnnnnnnnnnnnnnnnnnnnnnnnnnnnnnnnnnnnnnnnnnnnnnnnnnnnnnnnnnnnnnnnnnnnnnnnnnnnnnnnnnnnnnnnnnnnnnnnnnnnnnnnnnnnnnnnnnnnnnnnnnnnnnnnnnnnnnnnnnnnnnnnnnnnnnnnnnnnnnnnnnnnnnnnnnnnnnnnnnnnnnnnnnnnnnnnnnnnnnnnnnnnnnnnnnnnnnnnnnnnnnnnnnnnnnnnnnnnnnnnnnnnnnnnnnnnnnnnnnnnnnnnnnnnnnnnnnnnnnnnnnnnnnnnnnnnnnnnnnnnnnnnnnnnnnnnnnnnnnnnnnnnnnnnnnnnnnnnnnnnnnnnnnnnnnnnnnnnnnnnnnnnnnnnnnnnnnnnnnnnnnnnnnnnnnnnnnnnnnnnnnnnnnnnnnnnnnnnnnnnnnnnnnnnnnnnnnnnnnnnnnnnnnnnnnnnnnnnnnnnnnnnnnnnnnnnnnnnnnnnnnnnnnnnnnnnnnnnnnnnnnnnnnnnnnnnnnnnnnnnnnnnnnnnnnnnnnnnnnnnnnnnnnnnnnnnnnnnnnnnnnnnnnnnnnnnnnnnnnnnnnnnnnnnnnnnnnnnnnnnnnnnnnnnnnnnnnnnnnnnnnnnnnnnnnnnnnnnnnnnnnnnnnnnnnnnnnnnnnnnnnnnnnnnnnnnnnnnnnnnnnnnnnnnnnnnnnnnnnnnnnnnnnnnnnnnnnnnnnnnnnnnnnnnnnnnnnnnnnnnnnnnnnnnnnnnnnnnnnnnnnnnnnnnnnnnnnnnnnnnnnnnnnnnnnnnnnnnnnnnnnnnnnnnnnnnnnnnnnnnnnnnnnnnnnnnnnnnnnnnnnnnnnnnnnnnnnnnnnnnnnnnnnnnnnnnnnnnnnnnnnnnnnnnnnnnnnnnnnnnnnnnnnnnnnnnnnnnnnnnnnnnnnnnnnnnnnnnnnnnnnnnnnnnnnnnnnnnnnnnnnnnnnnnnnnnnnnnnnnnnnnnnnnnnnnnnnnnnnnnnnnnnnnnnnnnnnnnnnnnnnnnnnnnnnnnnnnnnnnnnnnnnnnnnnnnnnnnnnnnnnnnnnnnnnnnnnnnnnnnnnnnnnnnnnnnnnnnnnnnnnnnnnnnnnnnnnnnnnnnnnnnnnnnnnnnnnnnnnnnnnnnnnnnnnnnnnnnnnnnnnnnnnnnnnnnnnnnnnnnnnnnnnnnnnnnnnnnnnnnnnnnnnnnnnnnnnnnnnnnnnnnnnnnnnnnnnnnnnnnnnnnnnnnnnnnnnnnnnnnnnnnnnnnnnnnnnnnnnnnnnnnnnnnnnnnnnnnnnnnnnnnnnnnnnnnnnnnnnnnnnnnnnnnnnnnnnnnnnnnnnnnnnnnnnnnnnnnnnnnnnnnnnnnnnnnnnnnnnnnnnnnnnnnnnnnnnnnnnnnnnnnnnnnnnnnnnnnnnnnnnnnnnnnnnnnnnnnnnnnnnnnnnnnnnnnnnnnnnnnnnnnnnnnnnnnnnnnnnnnnnnnnnnnnnnnnnnnnnnnnnnnnnnnnnnnnnnnnnnnnnnnnnnnnnnnnnnnnnnnnnnnnnnnnnnnnnnnnnnnnnnnnnnnnnnnnnnnnnnnnnnnnnnnnnnnnnnnnnnnnnnnnnnnnnnnnnnnnnnnnnnnnnnnnnnnnnnnnnnnnnnnnnnnnnnnnnnnnnnnnnnnnnnnnnnnnnnnnnnnnnnnnnnnnnnnnnnnnnnnnnnnnnnnnnnnnnnnnnnnnnnnnnnnnnnnnnnnnnnnnnnnnnnnnnnnnnnnnnnnnnnnnnnnnnnnnnnnnnnnnnnnnnnnnnnnnnnnnnnnnnnnnnnnnnnnnnnnnnnnnnnnnnnnnnnnnnnnnnnnnnnnnnnnnnnnnnnnnnnnnnnnnnnnnnnnnnnnnnnnnnnnnnnnnnnnnnnnnnnnnnnnnnnnnnnnnnnnnnnnnnnnnnnnnnnnnnnnnnnnnnnnnnnnnnnnnnnnnnnnnnnnnnnnnnnnnnnnnnnnnnnnnnnnnnnnnnnnnnnnnnnnnnnnnnnnnnnnnnnnnnnnnnnnnnnnnnnnnnnnnnnnnnnnnnnnnnnnnnnnnnnnnnnnnnnnnnnnnnnnnnnnnnnnnnnnnnnnnnnnnnnnnnnnnnnnnnnnnnnnnnnnnnnnnnnnnnnnnnnnnnnnnnnnnnnnnnnnnnnnnnnnnnnnnnnnnnnnnnnnnnnnnnnnnnnnnnnnnnnnnnnnnnnnnnnnnnnnnnnnnnnnnnnnnnnnnnnnnnnnnnnnnnnnnnnnnnnnnnnnnnnnnnnnnnnnnnnnnnnnnnnnnnnnnnnnnnnnnnnnnnnnnnnnnnnnnnnnnnnnnnnnnnnnnnnnnnnnnnnnnnnnnnnnnnnnnnnnnnnnnnnnnnnnnnnnnnnnnnnnnnnnnnnnnnnnnnnnnnnnnnnnnnnnnnnnnnnnnnnnnnnnnnnnnnnnnnnnnnnnnnnnnnnnnnnnnnnnnnnnnnnnnnnnnnnnnnnnnnnnnnnnnnnnnnnnnnnnnnnnnnnnnnnnnnnnnnnnnnnnnnnnnnnnnnnnnnnnnnnnnnnnnnnnnnnnnnnnnnnnnnnnnnnnnnnnnnnnnnnnnnnnnnnnnnnnnnnnnnnnnnnnnnnnnnnnnnnnnnnnnnnnnnnnnnnnnnnnnnnnnnnnnnnnnnnnnnnnnnnnnnnnnnnnnnnnnnnnnnnnnnnnnnnnnnnnnnnnnnnnnnnnnnnnnnnnnnnnnnnnnnnnnnnnnnnnnnnnnnnnnnnnnnnnnnnnnnnnnnnnnnnnnnnnnnnnnnnnnnnnnnnnnnnnnnnnnnnnnnnnnnnnnnnnnnnnnnnnnnnnnnnnnnnnnnnnnnnnnnnnnnnnnnnnnnnnnnnnnnnnnnnnnnnnnnnnnnnnnnnnnnnnnnnnnnnnnnnnnnnnnnnnnnnnnnnnnnnnnnnnnnnnnnnnnnnnnnnnnnnnnnnnnnnnnnnnnnnnnnnnnnnnnnnnnnnnnnnnnnnnnnnnnnnnnnnnnnnnnnnnnnnnnnnnnnnnnnnnnnnnnnnnnnnnnnnnnnnnnnnnnnnnnnnnnnnnnnnnnnnnnnnnnnnnnnnnnnnnnnnnnnnnnnnnnnnnnnnnnnnnnnnnnnnnnnnnnnnnnnnnnnnnnnnnnnnnnnnnnnnnnnnnnnnnnnnnnnnnnnnnnnnnnnnnnnnnnnnnnnnnnnnnnnnnnnnnnnnnnnnnnnnnnnnnnnnnnnnnnnnnnnnnnnnnnnnnnnnnnnnnnnnnnnnnnnnnnnnnnnnnnnnnnnnnnnnnnnnnnnnnnnnnnnnnnnnnnnnnnnnnnnnnnnnnnnnnnnnnnnnnnnnnnnnnnnnnnnnnnnnnnnnnnnnnnnnnnnnnnnnnnnnnnnnnnnnnnnnnnnnnnnnnnnnnnnnnnnnnnnnnnnnnnnnnnnnnnnnnnnnnnnnnnnnnnnnnnnnnnnnnnnnnnnnnnnnnnnnnnnnnnnnnnnnnnnnnnnnnnnnnnnnnnnnnnnnnnnnnnnnnnnnnnnnnnnnnnnnnnnnnnnnnnnnnnnnnnnnnnnnnnnnnnnnnnnnnnnnnnnnnnnnnnnnnnnnnnnnnnnnnnnnnnnnnnnnnnnnnnnnnnnnnnnnnnnnnnnnnnnnnnnnnnnnnnnnnnnnnnnnnnnnnnnnnnnnnnnnnnnnnnnnnnnnnnnnnnnnnnnnnnnnnnnnnnnnnnnnnnnnnnnnnnnnnnnnnnnnnnnnnnnnnnnnnnnnnnnnnnnnnnnnnnnnnnnnnnnnnnnnnnnnnnnnnnnnnnnnnnnnnnnnnnnnnnnnnnnnnnnnnnnnnnnnnnnnnnnnnnnnnnnnnnnnnnnnnnnnnnnnnnnnnnnnnnnnnnnnnnnnnnnnnnnnnnnnnnnnnnnnnnnnnnnnnnnnnnnnnnnnnnnnnnnnnnnnnnnnnnnnnnnnnnnnnnnnnnnnnnnnnnnnnnnnnnnnnnnnnnnnnnnnnnnnnnnnnnnnnnnnnnnnnnnnnnnnnnnnnnnnnnnnnnnnnnnnnnnnnnnnnnnnnnnnnnnnnnnnnnnnnnnnnnnnnnnnnnnnnnnnnnnnnnnnnnnnnnnnnnnnnnnnnnnnnnnnnnnnnnnnnnnnnnnnnnnnnnnnnnnnnnnnnnnnnnnnnnnnnnnnnnnnnnnnnnnnnnnnnnnnnnnnnnnnnnnnnnnnnnnnnnnnnnnnnnnnnnnnnnnnnnnnnnnnnnnnnnnnnnnnnnnnnnnnnnnnnnnnnnnnnnnnnnnnnnnnnnnnnnnnnnnnnnnnnnnnnnnnnnnnnnnnnnnnnnnnnnnnnnnnnnnnnnnnnnnnnnnnnnnnnnnnnnnnnnnnnnnnnnnnnnnnnnnnnnnnnnnnnnnnnnnnnnnnnnnnnnnnnnnnnnnnnnnnnnnnnnnnnnnnnnnnnnnnnnnnnnnnnnnnnnnnnnnnnnnnnnnnnnnnnnnnnnnnnnnnnnnnnnnnnnnnnnnnnnnnnnnnnnnnnnnnnnnnnnnnnnnnnnnnnnnnnnnnnnnnnnnnnnnnnnnnnnnnnnnnnnnnnnnnnnnnnnnnnnnnnnnnnnnnnnnnnnnnnnnnnnnnnnnnnnnnnnnnnnnnnnnnnnnnnnnnnnnnnnnnnnnnnnnnnnnnnnnnnnnnnnnnnnnnnnnnnnnnnnnnnnnnnnnnnnnnnnnnnnnnnnnnnnnnnnnnnnnnnnnnnnnnnnnnnnnnnnnnnnnnnnnnnnnnnnnnnnnnnnnnnnnnnnnnnnnnnnnnnnnnnnnnnnnnnnnnnnnnnnnnnnnnnnnnnnnnnnnnnnnnnnnnnnnnnnnnnnnnnnnnnnnnnnnnnnnnnnnnnnnnnnnnnnnnnnnnnnnnnnnnnnnnnnnnnnnnnnnnnnnnnnnnnnnnnnnnnnnnnnnnnnnnnnnnnnnnnnnnnnnnnnnnnnnnnnnnnnnnnnnnnnnnnnnnnnnnnnnnnnnnnnnnnnnnnnnnnnnnnnnnnnnnnnnnnnnnnnnnnnnnnnnnnnnnnnnnnnnnnnnnnnnnnnnnnnnnnnnnnnnnnnnnnnnnnnnnnnnnnnnnnnnnnnnnnnnnnnnnnnnnnnnnnnnnnnnnnnnnnnnnnnnnnnnnnnnnnnnnnnnnnnnnnnnnnnnnnnnnnnnnnnnnnnnnnnnnnnnnnnnnnnnnnnnnnnnnnnnnnnnnnnnnnnnnnnnnnnnnnnnnnnnnnnnnnnnnnnnnnnnnnnnnnnnnnnnnnnnnnnnnnnnnnnnnnnnnnnnnnnnnnnnnnnnnnnnnnnnnnnnnnnnnnnnnnnnnnnnnnnnnnnnnnnnnnnnnnnnnnnnnnnnnnnnnnnnnnnnnnnnnnnnnnnnnnnnnnnnnnnnnnnnnnnnnnnnnnnnnnnnnnnnnnnnnnnnnnnnnnnnnnnnnnnnnnnnnnnnnnnnnnnnnnnnnnnnnnnnnnnnnnnnnnnnnnnnnnnnnnnnnnnnnnnnnnnnnnnnnnnnnnnnnnnnnnnnnnnnnnnnnnnnnnnnnnnnnnnnnnnnnnnnnnnnnnnnnnnnnnnnnnnnnnnnnnnnnnnnnnnnnnnnnnnnnnnnnnnnnnnnnnnnnnnnnnnnnnnnnnnnnnnnnnnnnnnnnnnnnnnnnnnnnnnnnnnnnnnnnnnnnnnnnnnnnnnnnnnnnnnnnnnnnnnnnnnnnnnnnnnnnnnnnnnnnnnnnnnnnnnnnnnnnnnnnnnnnnnnnnnnnnnnnnnnnnnnnnnnnnnnnnnnnnnnnnnnnnnnnnnnnnnnnnnnnnnnnnnnnnnnnnnnnnnnnnnnnnnnnnnnnnnnnnnnnnnnnnnnnnnnnnnnnnnnnnnnnnnnnnnnnnnnnnnnnnnnnnnnnnnnnnnnnnnnnnnnnnnnnnnnnnnnnnnnnnnnnnnnnnnnnnnnnnnnnnnnnnnnnnnnnnnnnnnnnnnnnnnnnnnnnnnnnnnnnnnnnnnnnnnnnnnnnnnnnnnnnnnnnnnnnnnnnnnnnnnnnnnnnnnnnnnnnnnnnnnnnnnnnnnnnnnnnnnnnnnnnnnnnnnnnnnnnnnnnnnnnnnnnnnnnnnnnnnnnnnnnnnnnnnnnnnnnnnnnnnnnnnnnnnnnnnnnnnnnnnnnnnnnnnnnnnnnnnnnnnnnnnnnnnnnnnnnnnnnnnnnnnnnnnnnnnnnnnnnnnnnnnnnnnnnnnnnnnnnnnnnnnnnnnnnnnnnnnnnnnnnnnnnnnnnnnnnnnnnnnnnnnnnnnnnnnnnnnnnnnnnnnnnnnnnnnnnnnnnnnnnnnnnnnnnnnnnnnnnnnnnnnnnnnnnnnnnnnnnnnnnnnnnnnnnnnnnnnnnnnnnnnnnnnnnnnnnnnnnnnnnnnnnnnnnnnnnnnnnnnnnnnnnnnnnnnnnnnnnnnnnnnnnnnnnnnnnnnnnnnnnnnnnnnnnnnnnnnnnnnnnnnnnnnnnnnnnnnnnnnnnnnnnnnnnnnnnnnnnnnnnnnnnnnnnnnnnnnnnnnnnnnnnnnnnnnnnnnnnnnnnnnnnnnnnnnnnnnnnnnnnnnnnnnnnnnnnnnnnnnnnnnnnnnnnnnnnnnnnnnnnnnnnnnnnnnnnnnnnnnnnnnnnnnnnnnnnnnnnnnnnnnnnnnnnnnnnnnnnnnnnnnnnnnnnnnnnnnnnnnnnnnnnnnnnnnnnnnnnnnnnnnnnnnnnnnnnnnnnnnnnnnnnnnnnnnnnnnnnnnnnnnnnnnnnnnnnnnnnnnnnnnnnnnnnnnnnnnnnnnnnnnnnnnnnnnnnnnnnnnnnnnnnnnnnnnnnnnnnnnnnnnnnnnnnnnnnnnnnnnnnnnnnnnnnnnnnnnnnnnnnnnnnnnnnnnnnnnnnnnnnnnnnnnnnnnnnnnnnnnnnnnnnnnnnnnnnnnnnnnnnnnnnnnnnnnnnnnnnnnnnnnnnnnnnnnnnnnnnnnnnnnnnnnnnnnnnnnnnnnnnnnnnnnnnnnnnnnnnnnnnnnnnnnnnnnnnnnnnnnnnnnnnnnnnnnnnnnnnnnnnnnnnnnnnnnnnnnnnnnnnnnnnnnnnnnnnnnnnnnnnnnnnnnnnnnnnnnnnnnnnnnnnnnnnnnnnnnnnnnnnnnnnnnnnnnnnnnnnnnnnnnnnnnnnnnnnnnnnnnnnnnnnnnnnnnnnnnnnnnnnnnnnnnnnnnnnnnnnnnnnnnnnnnnnnnnnnnnnnnnnnnnnnnnnnnnnnnnnnnnnnnnnnnnnnnnnnnnnnnnnnnnnnnnnnnnnnnnnnnnnnnnnnnnnnnnnnnnnnnnnnnnnnnnnnnnnnnnnnnnnnnnnnnnnnnnnnnnnnnnnnnnnnnnnnnnnnnnnnnnnnnnnnnnnnnnnnnnnnnnnnnnnnnnnnnnnnnnnnnnnnnnnnnnnnnnnnnnnnnnnnnnnnnnnnnnnnnnnnnnnnnnnnnnnnnnnnnnnnnnnnnnnnnnnnnnnnnnnnnnnnnnnnnnnnnnnnnnnnnnnnnnnnnnnnnnnnnnnnnnnnnnnnnnnnnnnnnnnnnnnnnnnnnnnnnnnnnnnnnnnnnnnnnnnnnnnnnnnnnnnnnnnnnnnnnnnnnnnnnnnnnnnnnnnnnnnnnnnnnnnnnnnnnnnnnnnnnnnnnnnnnnnnnnnnnnnnnnnnnnnnnnnnnnnnnnnnnnnnnnnnnnnnnnnnnnnnnnnnnnnnnnnnnnnnnnnnnnnnnnnnnnnnnnnnnnnnnnnnnnnnnnnnnnnnnnnnnnnnnnnnnnnnnnnnnnnnnnnnnnnnnnnnnnnnnnnnnnnnnnnnnnnnnnnnnnnnnnnnnnnnnnnnnnnnnnnnnnnnnnnnnnnnnnnnnnnnnnnnnnnnnnnnnnnnnnnnnnnnnnnnnnnnnnnnnnnnnnnnnnnnnnnnnnnnnnnnnnnnnnnnnnnnnnnnnnnnnnnnnnnnnnnnnnnnnnnnnnnnnnnnnnnnnnnnnnnnnnnnnnnnnnnnnnnnnnnnnnnnnnnnnnnnnnnnnnnnnnnnnnnnnnnnnnnnnnnnnnnnnnnnnnnnnnnnnnnnnnnnnnnnnnnnnnnnnnnnnnnnnnnnnnnnnnnnnnnnnnnnnnnnnnnnnnnnnnnnnnnnnnnnnnnnnnnnnnnnnnnnnnnnnnnnnnnnnnnnnnnnnnnnnnnnnnnnnnnnnnnnnnnnnnnnnnnnnnnnnnnnnnnnnnnnnnnnnnnnnnnnnnnnnnnnnnnnnnnnnnnnnnnnnnnnnnnnnnnnnnnnnnnnnnnnnnnnnnnnnnnnnnnnnnnnnnnnnnnnnnnnnnnnnnnnnnnnnnnnnnnnnnnnnnnnnnnnnnnnnnnnnnnnnnnnnnnnnnnnnnnnnnnnnnnnnnnnnnnnnnnnnnnnnnnnnnnnnnnnnnnnnnnnnnnnnnnnnnnnnnnnnnnnnnnnnnnnnnnnnnnnnnnnnnnnnnnnnnnnnnnnnnnnnnnnnnnnnnnnnnnnnnnnnnnnnnnnnnnnnnnnnnnnnnnnnnnnnnnnnnnnnnnnnnnnnnnnnnnnnnnnnnnnnnnnnnnnnnnnnnnnnnnnnnnnnnnnnnnnnnnnnnnnnnnnnnnnnnnnnnnnnnnnnnnnnnnnnnnnnnnnnnnnnnnnnnnnnnnnnnnnnnnnnnnnnnnnnnnnnnnnnnnnnnnnnnnnnnnnnnnnnnnnnnnnnnnnnnnnnnnnnnnnnnnnnnnnnnnnnnnnnnnnnnnnnnnnnnnnnnnnnnnnnnnnnnnnnnnnnnnnnnnnnnnnnnnnnnnnnnnnnnnnnnnnnnnnnnnnnnnnnnnnnnnnnnnnnnnnnnnnnnnnnnnnnnnnnnnnnnnnnnnnnnnnnnnnnnnnnnnnnnnnnnnnnnnnnnnnnnnnnnnnnnnnnnnnnnnnnnnnnnnnnnnnnnnnnnnnnnnnnnnnnnnnnnnnnnnnnnnnnnnnnnnnnnnnnnnnnnnnnnnnnnnnnnnnnnnnnnnnnnnnnnnnnnnnnnnnnnnnnnnnnnnnnnnnnnnnnnnnnnnnnnnnnnnnnnnnnnnnnnnnnnnnnnnnnnnnnnnnnnnnnnnnnnnnnnnnnnnnnnnnnnnnnnnnnnnnnnnnnnnnnnnnnnnnnnnnnnnnnnnnnnnnnnnnnnnnnnnnnnnnnnnnnnnnnnnnnnnnnnnnnnnnnnnnnnnnnnnnnnnnnnnnnnnnnnnnnnnnnnnnnnnnnnnnnnnnnnnnnnnnnnnnnnnnnnnnnnnnnnnnnnnnnnnnnnnnnnnnnnnnnnnnnnnnnnnnnnnnnnnnnnnnnnnnnnnnnnnnnnnnnnnnnnnnnnnnnnnnnnnnnnnnnnnnnnnnnnnnnnnnnnnnnnnnnnnnnnnnnnnnnnnnnnnnnnnnnnnnnnnnnnnnnnnnnnnnnnnnnnnnnnnnnnnnnnnnnnnnnnnnnnnnnnnnnnnnnnnnnnnnnnnnnnnnnnnnnnnnnnnnnnnnnnnnnnnnnnnnnnnnnnnnnnnnnnnnnnnnnnnnnnnnnnnnnnnnnnnnnnnnnnnnnnnnnnnnnnnnnnnnnnnnnnnnnnnnnnnnnnnnnnnnnnnnnnnnnnnnnnnnnnnnnnnnnnnnnnnnnnnnnnnnnnnnnnnnnnnnnnnnnnnnnnnnnnnnnnnnnnnnnnnnnnnnnnnnnnnnnnnnnnnnnnnnnnnnnnnnnnnnnnnnnnnnnnnnnnnnnnnnnnnnnnnnnnnnnnnnnnnnnnnnnnnnnnnnnnnnnnnnnnnnnnnnnnnnnnnnnnnnnnnnnnnnnnnnnnnnnnnnnnnnnnnnnnnnnnnnnnnnnnnnnnnnnnnnnnnnnnnnnnnnnnnnnnnnnnnnnnnnnnnnnnnnnnnnnnnnnnnnnnnnnnnnnnnnnnnnnnnnnnnnnnnnnnnnnnnnnnnnnnnnnnnnnnnnnnnnnnnnnnnnnnnnnnnnnnnnnnnnnnnnnnnnnnnnnnnnnnnnnnnnnnnnnnnnnnnnnnnnnnnnnnnnnnnnnnnnnnnnnnnnnnnnnnnnnnnnnnnnnnnnnnnnnnnnnnnnnnnnnnnnnnnnnnnnnnnnnnnnnnnnnnnnnnnnnnnnnnnnnnnnnnnnnnnnnnnnnnnnnnnnnnnnnnnnnnnnnnnnnnnnnnnnnnnnnnnnnnnnnnnnnnnnnnnnnnnnnnnnnnnnnnnnnnnnnnnnnnnnnnnnnnnnnnnnnnnnnnnnnnnnnnnnnnnnnnnnnnnnnnnnnnnnnnnnnnnnnnnnnnnnnnnnnnnnnnnnnnnnnnnnnnnnnnnnnnnnnnnnnnnnnnnnnnnnnnnnnnnnnnnnnnnnnnnnnnnnnnnnnnnnnnnnnnnnnnnnnnnnnnnnnnnnnnnnnnnnnnnnnnnnnnnnnnnnnnnnnnnnnnnnnnnnnnnnnnnnnnnnnnnnnnnnnnnnnnnnnnnnnnnnnnnnnnnnnnnnnnnnnnnnnnnnnnnnnnnnnnnnnnnnnnnnnnnnnnnnnnnnnnnnnnnnnnnnnnnnnnnnnnnnnnnnnnnnnnnnnnnnnnnnnnnnnnnnnnnnnnnnnnnnnnnnnnnnnnnnnnnnnnnnnnnnnnnnnnnnnnnnnnnnnnnnnnnnnnnnnnnnnnnnnnnnnnnnnnnnnnnnnnnnnnnnnnnnnnnnnnnnnnnnnnnnnnnnnnnnnnnnnnnnnnnnnnnnnnnnnnnnnnnnnnnnnnnnnnnnnnnnnnnnnnnnnnnnnnnnnnnnnnnnnnnnnnnnnnnnnnnnnnnnnnnnnnnnnnnnnnnnnnnnnnnnnnnnnnnnnnnnnnnnnnnnnnnnnnnnnnnnnnnnnnnnnnnnnnnnnnnnnnnnnnnnnnnnnnnnnnnnnnnnnnnnnnnnnnnnnnnnnnnnnnnnnnnnnnnnnnnnnnnnnnnnnnnnnnnnnnnnnnnnnnnnnnnnnnnnnnnnnnnnnnnnnnnnnnnnnnnnnnnnnnnnnnnnnnnnnnnnnnnnnnnnnnnnnnnnnnnnnnnnnnnnnnnnnnnnnnnnnnnnnnnnnnnnnnnnnnnnnnnnnnnnnnnnnnnnnnnnnnnnnnnnnnnnnnnnnnnnnnnnnnnnnnnnnnnnnnnnnnnnnnnnnnnnnnnnnnnnnnnnnnnnnnnnnnnnnnnnnnnnnnnnnnnnnnnnnnnnnnnnnnnnnnnnnnnnnnnnnnnnnnnnnnnnnnnnnnnnnnnnnnnnnnnnnnnnnnnnnnnnnnnnnnnnnnnnnnnnnnnnnnnnnnnnnnnnnnnnnnnnnnnnnnnnnnnnnnnnnnnnnnnnnnnnnnnnnnnnnnnnnnnnnnnnnnnnnnnnnnnnnnnnnnnnnnnnnnnnnnnnnnnnnnnnnnnnnnnnnnnnnnnnnnnnnnnnnnnnnnnnnnnnnnnnnnnnnnnnnnnnnnnnnnnnnnnnnnnnnnnnnnnnnnnnnnnnnnnnnnnnnnnnnnnnnnnnnnnnnnnnnnnnnnnnnnnnnnnnnnnnnnnnnnnnnnnnnnnnnnnnnnnnnnnnnnnnnnnnnnnnnnnnnnnnnnnnnnnnnnnnnnnnnnnnnnnnnnnnnnnnnnnnnnnnnnnnnnnnnnnnnnnnnnnnnnnnnnnnnnnnnnnnnnnnnnnnnnnnnnnnnnnnnnnnnnnnnnnnnnnnnnnnnnnnnnnnnnnnnnnnnnnnnnnnnnnnnnnnnnnnnnnnnnnnnnnnnnnnnnnnnnnnnnnnnnnnnnnnnnnnnnnnnnnnnnnnnnnnnnnnnnnnnnnnnnnnnnnnnnnnnnnnnnnnnnnnnnnnnnnnnnnnnnnnnnnnnnnnnnnnnnnnnnnnnnnnnnnnnnnnnnnnnnnnnnnnnnnnnnnnnnnnnnnnnnnnnnnnnnnnnnnnnnnnnnnnnnnnnnnnnnnnnnnnnnnnnnnnnnnnnnnnnnnnnnnnnnnnnnnnnnnnnnnnnnnnnnnnnnnnnnnnnnnnnnnnnnnnnnnnnnnnnnnnnnnnnnnnnnnnnnnnnnnnnnnnnnnnnnnnnnnnnnnnnnnnnnnnnnnnnnnnnnnnnnnnnnnnnnnnnnnnnnnnnnnnnnnnnnnnnnnnnnnnnnnnnnnnnnnnnnnnnnnnnnnnnnnnnnnnnnnnnnnnnnnnnnnnnnnnnnnnnnnnnnnnnnnnnnnnnnnnnnnnnnnnnnnnnnnnnnnnnnnnnnnnnnnnnnnnnnnnnnnnnnnnnnnnnnnnnnnnnnnnnnnnnnnnnnnnnnnnnnnnnnnnnnnnnnnnnnnnnnnnnnnnnnnnnnnnnnnnnnnnnnnnnnnnnnnnnnnnnnnnnnnnnnnnnnnnnnnnnnnnnnnnnnnnnnnnnnnnnnnnnnnnnnnnnnnnnnnnnnnnnnnnnnnnnnnnnnnnnnnnnnnnnnnnnnnnnnnnnnnnnnnnnnnnnnnnnnnnnnnnnnnnnnnnnnnnnnnnnnnnnnnnnnnnnnnnnnnnnnnnnnnnnnnnnnnnnnnnnnnnnnnnnnnnnnnnnnnnnnnnnnnnnnnnnnnnnnnnnnnnnnnnnnnnnnnnnnnnnnnnnnnnnnnnnnnnnnnnnnnnnnnnnnnnnnnnnnnnnnnnnnnnnnnnnnnnnnnnnnnnnnnnnnnnnnnnnnnnnnnnnnnnnnnnnnnnnnnnnnnnnnnnnnnnnnnnnnnnnnnnnnnnnnnnnnnnnnnnnnnnnnnnnnnnnnnnnnnnnnnnnnnnnnnnnnnnnnnnnnnnnnnnnnnnnnnnnnnnnnnnnnnnnnnnnnnnnnnnnnnnnnnnnnnnnnnnnnnnnnnnnnnnnnnnnnnnnnnnnnnnnnnnnnnnnnnnnnnnnnnnnnnnnnnnnnnnnnnnnnnnnnnnnnnnnnnnnnnnnnnnnnnnnnnnnnnnnnnnnnnnnnnnnnnnnnnnnnnnnnnnnnnnnnnnnnnnnnnnnnnnnnnnnnnnnnnnnnnnnnnnnnnnnnnnnnnnnnnnnnnnnnnnnnnnnnnnnnnnnnnnnnnnnnnnnnnnnnnnnnnnnnnnnnnnnnnnnnnnnnnnnnnnnnnnnnnnnnnnnnnnnnnnnnnnnnnnnnnnnnnnnnnnnnnnnnnnnnnnnnnnnnnnnnnnnnnnnnnnnnnnnnnnnnnnnnnnnnnnnnnnnnnnnnnnnnnnnnnnnnnnnnnnnnnnnnnnnnnnnnnnnnnnnnnnnnnnnnnnnnnnnnnnnnnnnnnnnnnnnnnnnnnnnnnnnnnnnnnnnnnnnnnnnnnnnnnnnnnnnnnnnnnnnnnnnnnnnnnnnnnnnnnnnnnnnnnnnnnnnnnnnnnnnnnnnnnnnnnnnnnnnnnnnnnnnnnnnnnnnnnnnnnnnnnnnnnnnnnnnnnnnnnnnnnnnnnnnnnnnnnnnnnnnnnnnnnnnnnnnnnnnnnnnnnnnnnnnnnnnnnnnnnnnnnnnnnnnnnnnnnnnnnnnnnnnnnnnnnnnnnnnnnnnnnnnnnnnnnnnnnnnnnnnnnnnnnnnnnnnnnnnnnnnnnnnnnnnnnnnnnnnnnnnnnnnnnnnnnnnnnnnnnnnnnnnnnnnnnnnnnnnnnnnnnnnnnnnnnnnnnnnnnnnnnnnnnnnnnnnnnnnnnnnnnnnnnnnnnnnnnnnnnnnnnnnnnnnnnnnnnnnnnnnnnnnnnnnnnnnnnnnnnnnnnnnnnnnnnnnnnnnnnnnnnnnnnnnnnnnnnnnnnnnnnnnnnnnnnnnnnnnnnnnnnnnnnnnnnnnnnnnnnnnnnnnnnnnnnnnnnnnnnnnnnnnnnnnnnnnnnnnnnnnnnnnnnnnnnnnnnnnnnnnnnnnnnnnnnnnnnnnnnnnnnnnnnnnnnnnnnnnnnnnnnnnnnnnnnnnnnnnnnnnnnnnnnnnnnnnnnnnnnnnnnnnnnnnnnnnnnnnnnnnnnnnnnnnnnnnnnnnnnnnnnnnnnnnnnnnnnnnnnnnnnnnnnnnnnnnnnnnnnnnnnnnnnnnnnnnnnnnnnnnnnnnnnnnnnnnnnnnnnnnnnnnnnnnnnnnnnnnnnnnnnnnnnnnnnnnnnnnnnnnnnnnnnnnnnnnnnnnnnnnnnnnnnnnnnnnnnnnnnnnnnnnnnnnnnnnnnnnnnnnnnnnnnnnnnnnnnnnnnnnnnnnnnnnnnnnnnnnnnnnnnnnnnnnnnnnnnnnnnnnnnnnnnnnnnnnnnnnnnnnnnnnnnnnnnnnnnnnnnnnnnnnnnnnnnnnnnnnnnnnnnnnnnnnnnnnnnnnnnnnnnnnnnnnnnnnnnnnnnnnnnnnnnnnnnnnnnnnnnnnnnnnnnnnnnnnnnnnnnnnnnnnnnnnnnnnnnnnnnnnnnnnnnnnnnnnnnnnnnnnnnnnnnnnnnnnnnnnnnnnnnnnnnnnnnnnnnnnnnnnnnnnnnnnnnnnnnnnnnnnnnnnnnnnnnnnnnnnnnnnnnnnnnnnnnnnnnnnnnnnnnnnnnnnnnnnnnnnnnnnnnnnnnnnnnnnnnnnnnnnnnnnnnnnnnnnnnnnnnnnnnnnnnnnnnnnnnnnnnnnnnnnnnnnnnnnnnnnnnnnnnnnnnnnnnnnnnnnnnnnnnnnnnnnnnnnnnnnnnnnnnnnnnnnnnnnnnnnnnnnnnnnnnnnnnnnnnnnnnnnnnnnnnnnnnnnnnnnnnnnnnnnnnnnnnnnnnnnnnnnnnnnnnnnnnnnnnnnnnnnnnnnnnnnnnnnnnnnnnnnnnnnnnnnnnnnnnnnnnnnnnnnnnnnnnnnnnnnnnnnnnnnnnnnnnnnnnnnnnnnnnnnnnnnnnnnnnnnnnnnnnnnnnnnnnnnnnnnnnnnnnnnnnnnnnnnnnnnnnnnnnnnnnnnnnnnnnnnnnnnnnnnnnnnnnnnnnnnnnnnnnnnnnnnnnnnnnnnnnnnnnnnnnnnnnnnnnnnnnnnnnnnnnnnnnnnnnnnnnnnnnnnnnnnnnnnnnnnnnnnnnnnnnnnnnnnnnnnnnnnnnnnnnnnnnnnnnnnnnnnnnnnnnnnnnnnnnnnnnnnnnnnnnnnnnnnnnnnnnnnnnnnnnnnnnnnnnnnnnnnnnnnnnnnnnnnnnnnnnnnnnnnnnnnnnnnnnnnnnnnnnnnnnnnnnnnnnnnnnnnnnnnnnnnnnnnnnnnnnnnnnnnnnnnnnnnnnnnnnnnnnnnnnnnnnnnnnnnnnnnnnnnnnnnnnnnnnnnnnnnnnnnnnnnnnnnnnnnnnnnnnnnnnnnnnnnnnnnnnnnnnnnnnnnnnnnnnnnnnnnnnnnnnnnnnnnnnnnnnnnnnnnnnnnnnnnnnnnnnnnnnnnnnnnnnnnnnnnnnnnnnnnnnnnnnnnnnnnnnnnnnnnnnnnnnnnnnnnnnnnnnnnnnnnnnnnnnnnnnnnnnnnnnnnnnnnnnnnnnnnnnnnnnnnnnnnnnnnnnnnnnnnnnnnnnnnnnnnnnnnnnnnnnnnnnnnnnnnnnnnnnnnnnnnnnnnnnnnnnnnnnnnnnnnnnnnnnnnnnnnnnnnnnnnnnnnnnnnnnnnnnnnnnnnnnnnnnnnnnnnnnnnnnnnnnnnnnnnnnnnnnnnnnnnnnnnnnnnnnnnnnnnnnnnnnnnnnnnnnnnnnnnnnnnnnnnnnnnnnnnnnnnnnnnnnnnnnnnnnnnnnnnnnnnnnnnnnnnnnnnnnnnnnnnnnnnnnnnnnnnnnnnnnnnnnnnnnnnnnnnnnnnnnnnnnnnnnnnnnnnnnnnnnnnnnnnnnnnnnnnnnnnnnnnnnnnnnnnnnnnnnnnnnnnnnnnnnnnnnnnnnnnnnnnnnnnnnnnnnnnnnnnnnnnnnnnnnnnnnnnnnnnnnnnnnnnnnnnnnnnnnnnnnnnnnnnnnnnnnnnnnnnnnnnnnnnnnnnnnnnnnnnnnnnnnnnnnnnnnnnnnnnnnnnnnnnnnnnnnnnnnnnnnnnnnnnnnnnnnnnnnnnnnnnnnnnnnnnnnnnnnnnnnnnnnnnnnnnnnnnnnnnnnnnnnnnnnnnnnnnnnnnnnnnnnnnnnnnnnnnnnnnnnnnnnnnnnnnnnnnnnnnnnnnnnnnnnnnnnnnnnnnnnnnnnnnnnnnnnnnnnnnnnnnnnnnnnnnnnnnnnnnnnnnnnnnnnnnnnnnnnnnnnnnnnnnnnnnnnnnnnnnnnnnnnnnnnnnnnnnnnnnnnnnnnnnnnnnnnnnnnnnnnnnnnnnnnnnnnnnnnnnnnnnnnnnnnnnnnnnnnnnnnnnnnnnnnnnnnnnnnnnnnnnnnnnnnnnnnnnnnnnnnnnnnnnnnnnnnnnnnnnnnnnnnnnnnnnnnnnnnnnnnnnnnnnnnnnnnnnnnnnnnnnnnnnnnnnnnnnnnnnnnnnnnnnnnnnnnnnnnnnnnnnnnnnnnnnnnnnnnnnnnnnnnnnnnnnnnnnnnnnnnnnnnnnnnnnnnnnnnnnnnnnnnnnnnnnnnnnnnnnnnnnnnnnnnnnnnnnnnnnnnnnnnnnnnnnnnnnnnnnnnnnnnnnnnnnnnnnnnnnnnnnnnnnnnnnnnnnnnnnnnnnnnnnnnnnnnnnnnnnnnnnnnnnnnnnnnnnnnnnnnnnnnnnnnnnnnnnnnnnnnnnnnnnnnnnnnnnnnnnnnnnnnnnnnnnnnnnnnnnnnnnnnnnnnnnnnnnnnnnnnnnnnnnnnnnnnnnnnnnnnnnnnnnnnnnnnnnnnnnnnnnnnnnnnnnnnnnnnnnnnnnnnnnnnnnnnnnnnnnnnnnnnnnnnnnnnnnnnnnnnnnnnnnnnnnnnnnnnnnnnnnnnnnnnnnnnnnnnnnnnnnnnnnnnnnnnnnnnnnnnnnnnnnnnnnnnnnnnnnnnnnnnnnnnnnnnnnnnnnnnnnnnnnnnnnnnnnnnnnnnnnnnnnnnnnnnnnnnnnnnnnnnnnnnnnnnnnnnnnnnnnnnnnnnnnnnnnnnnnnnnnnnnnnnnnnnnnnnnnnnnnnnnnnnnnnnnnnnnnnnnnnnnnnnnnnnnnnnnnnnnnnnnnnnnnnnnnnnnnnnnnnnnnnnnnnnnnnnnnnnnnnnnnnnnnnnnnnnnnnnnnnnnnnnnnnnnnnnnnnnnnnnnnnnnnnnnnnnnnnnnnnnnnnnnnnnnnnnnnnnnnnnnnnnnnnnnnnnnnnnnnnnnnnnnnnnnnnnnnnnnnnnnnnnnnnnnnnnnnnnnnnnnnnnnnnnnnnnnnnnnnnnnnnnnnnnnnnnnnnnnnnnnnnnnnnnnnnnnnnnnnnnnnnnnnnnnnnnnnnnnnnnnnnnnnnnnnnnnnnnnnnnnnnnnnnnnnnnnnnnnnnnnnnnnnnnnnnnnnnnnnnnnnnnnnnnnnnnnnnnnnnnnnnnnnnnnnnnnnnnnnnnnnnnnnnnnnnnnnnnnnnnnnnnnnnnnnnnnnnnnnnnnnnnnnnnnnnnnnnnnnnnnnnnnnnnnnnnnnnnnnnnnnnnnnnnnnnnnnnnnnnnnnnnnnnnnnnnnnnnnnnnnnnnnnnnnnnnnnnnnnnnnnnnnnnnnnnnnnnnnnnnnnnnnnnnnnnnnnnnnnnnnnnnnnnnnnnnnnnnnnnnnnnnnnnnnnnnnnnnnnnnnnnnnnnnnnnnnnnnnnnnnnnnnnnnnnnnnnnnnnnnnnnnnnnnnnnnnnnnnnnnnnnnnnnnnnnnnnnnnnnnnnnnnnnnnnnnnnnnnnnnnnnnnnnnnnnnnnnnnnnnnnnnnnnnnnnnnnnnnnnnnnnnnnnnnnnnnnnnnnnnnnnnnnnnnnnnnnnnnnnnnnnnnnnnnnnnnnnnnnnnnnnnnnnnnnnnnnnnnnnnnnnnnnnnnnnnnnnnnnnnnnnnnnnnnnnnnnnnnnnnnnnnnnnnnnnnnnnnnnnnnnnnnnnnnnnnnnnnnnnnnnnnnnnnnnnnnnnnnnnnnnnnnnnnnnnnnnnnnnnnnnnnnnnnnnnnnnnnnnnnnnnnnnnnnnnnnnnnnnnnnnnnnnnnnnnnnnnnnnnnnnnnnnnnnnnnnnnnnnnnnnnnnnnnnnnnnnnnnnnnnnnnnnnnnnnnnnnnnnnnnnnnnnnnnnnnnnnnnnnnnnnnnnnnnnnnnnnnnnnnnnnnnnnnnnnnnnnnnnnnnnnnnnnnnnnnnnnnnnnnnnnnnnnnnnnnnnnnnnnnnnnnnnnnnnnnnnnnnnnnnnnnnnnnnnnnnnnnnnnnnnnnnnnnnnnnnnnnnnnnnnnnnnnnnnnnnnnnnnnnnnnnnnnnnnnnnnnnnnnnnnnnnnnnnnnnnnnnnnnnnnnnnnnnnnnnnnnnnnnnnnnnnnnnnnnnnnnnnnnnnnnnnnnnnnnnnnnnnnnnnnnnnnnnnnnnnnnnnnnnnnnnnnnnnnnnnnnnnnnnnnnnnnnnnnnnnnnnnnnnnnnnnnnnnnnnnnnnnnnnnnnnnnnnnnnnnnnnnnnnnnnnnnnnnnnnnnnnnnnnnnnnnnnnnnnnnnnnnnnnnnnnnnnnnnnnnnnnnnnnnnnnnnnnnnnnnnnnnnnnnnnnnnnnnnnnnnnnnnnnnnnnnnnnnnnnnnnnnnnnnnnnnnnnnnnnnnnnnnnnnnnnnnnnnnnnnnnnnnnnnnnnnnnnnnnnnnnnnnnnnnnnnnnnnnnnnnnnnnnnnnnnnnnnnnnnnnnnnnnnnnnnnnnnnnnnnnnnnnnnnnnnnnnnnnnnnnnnnnnnnnnnnnnnnnnnnnnnnnnnnnnnnnnnnnnnnnnnnnnnnnnnnnnnnnnnnnnnnnnnnnnnnnnnnnnnnnnnnnnnnnnnnnnnnnnnnnnnnnnnnnnnnnnnnnnnnnnnnnnnnnnnnnnnnnnnnnnnnnnnnnnnnnnnnnnnnnnnnnnnnnnnnnnnnnnnnnnnnnnnnnnnnnnnnnnnnnnnnnnnnnnnnnnnnnnnnnnnnnnnnnnnnnnnnnnnnnnnnnnnnnnnnnnnnnnnnnnnnnnnnnnnnnnnnnnnnnnnnnnnnnnnnnnnnnnnnnnnnnnnnnnnnnnnnnnnnnnnnnnnnnnnnnnnnnnnnnnnnnnnnnnnnnnnnnnnnnnnnnnnnnnnnnnnnnnnnnnnnnnnnnnnnnnnnnnnnnnnnnnnnnnnnnnnnnnnnnnnnnnnnnnnnnnnnnnnnnnnnnnnnnnnnnnnnnnnnnnnnnnnnnnnnnnnnnnnnnnnnnnnnnnnnnnnnnnnnnnnnnnnnnnnnnnnnnnnnnnnnnnnnnnnnnnnnnnnnnnnnnnnnnnnnnnnnnnnnnnnnnnnnnnnnnnnnnnnnnnnnnnnnnnnnnnnnnnnnnnnnnnnnnnnnnnnnnnnnnnnnnnnnnnnnnnnnnnnnnnnnnnnnnnnnnnnnnnnnnnnnnnnnnnnnnnnnnnnnnnnnnnnnnnnnnnnnnnnnnnnnnnnnnnnnnnnnnnnnnnnnnnnnnnnnnnnnnnnnnnnnnnnnnnnnnnnnnnnnnnnnnnnnnnnnnnnnnnnnnnnnnnnnnnnnnnnnnnnnnnnnnnnnnnnnnnnnnnnnnnnnnnnnnnnnnnnnnnnnnnnnnnnnnnnnnnnnnnnnnnnnnnnnnnnnnnnnnnnnnnnnnnnnnnnnnnnnnnnnnnnnnnnnnnnnnnnnnnnnnnnnnnnnnnnnnnnnnnnnnnnnnnnnnnnnnnnnnnnnnnnnnnnnnnnnnnnnnnnnnnnnnnnnnnnnnnnnnnnnnnnnnnnnnnnnnnnnnnnnnnnnnnnnnnnnnnnnnnnnnnnnnnnnnnnnnnnnnnnnnnnnnnnnnnnnnnnnnnnnnnnnnnnnnnnnnnnnnnnnnnnnnnnnnnnnnnnnnnnnnnnnnnnnnnnnnnnnnnnnnnnnnnnnnnnnnnnnnnnnnnnnnnnnnnnnnnnnnnnnnnnnnnnnnnnnnnnnnnnnnnnnnnnnnnnnnnnnnnnnnnnnnnnnnnnnnnnnnnnnnnnnnnnnnnnnnnnnnnnnnnnnnnnnnnnnnnnnnnnnnnnnnnnnnnnnnnnnnnnnnnnnnnnnnnnnnnnnnnnnnnnnnnnnnnnnnnnnnnnnnnnnnnnnnnnnnnnnnnnnnnnnnnnnnnnnnnnnnnnnnnnnnnnnnnnnnnnnnnnnnnnnnnnnnnnnnnnnnnnnnnnnnnnnnnnnnnnnnnnnnnnnnnnnnnnnnnnnnnnnnnnnnnnnnnnnnnnnnnnnnnnnnnnnnnnnnnnnnnnnnnnnnnnnnnnnnnnnnnnnnnnnnnnnnnnnnnnnnnnnnnnnnnnnnnnnnnnnnnnnnnnnnnnnnnnnnnnnnnnnnnnnnnnnnnnnnnnnnnnnnnnnnnnnnnnnnnnnnnnnnnnnnnnnnnnnnnnnnnnnnnnnnnnnnnnnnnnnnnnnnnnnnnnnnnnnnnnnnnnnnnnnnnnnnnnnnnnnnnnnnnnnnnnnnnnnnnnnnnnnnnnnnnnnnnnnnnnnnnnnnnnnnnnnnnnnnnnnnnnnnnnnnnnnnnnnnnnnnnnnnnnnnnnnnnnnnnnnnnnnnnnnnnnnnnnnnnnnnnnnnnnnnnnnnnnnnnnnnnnnnnnnnnnnnnnnnnnnnnnnnnnnnnnnnnnnnnnnnnnnnnnnnnnnnnnnnnnnnnnnnnnnnnnnnnnnnnnnnnnnnnnnnnnnnnnnnnnnnnnnnnnnnnnnnnnnnnnnnnnnnnnnnnnnnnnnnnnnnnnnnnnnnnnnnnnnnnnnnnnnnnnnnnnnnnnnnnnnnnnnnnnnnnnnnnnnnnnnnnnnnnnnnnnnnnnnnnnnnnnnnnnnnnnnnnnnnnnnnnnnnnnnnnnnnnnnnnnnnnnnnnnnnnnnnnnnnnnnnnnnnnnnnnnnnnnnnnnnnnnnnnnnnnnnnnnnnnnnnnnnnnnnnnnnnnnnnnnnnnnnnnnnnnnnnnnnnnnnnnnnnnnnnnnnnnnnnnnnnnnnnnnnnnnnnnnnnnnnnnnnnnnnnnnnnnnnnnnnnnnnnnnnnnnnnnnnnnnnnnnnnnnnnnnnnnnnnnnnnnnnnnnnnnnnnnnnnnnnnnnnnnnnnnnnnnnnnnnnnnnnnnnnnnnnnnnnnnnnnnnnnnnnnnnnnnnnnnnnnnnnnnnnnnnnnnnnnnnnnnnnnnnnnnnnnnnnnnnnnnnnnnnnnnnnnnnnnnnnnnnnnnnnnnnnnnnnnnnnnnnnnnnnnnnnnnnnnnnnnnnnnnnnnnnnnnnnnnnnnnnnnnnnnnnnnnnnnnnnnnnnnnnnnnnnnnnnnnnnnnnnnnnnnnnnnnnnnnnnnnnnnnnnnnnnnnnnnnnnnnnnnnnnnnnnnnnnnnnnnnnnnnnnnnnnnnnnnnnnnnnnnnnnnnnnnnnnnnnnnnnnnnnnnnnnnnnnnnnnnnnnnnnnnnnnnnnnnnnnnnnnnnnnnnnnnnnnnnnnnnnnnnnnnnnnnnnnnnnnnnnnnnnnnnnnnnnnnnnnnnnnnnnnnnnnnnnnnnnnnnnnnnnnnnnnnnnnnnnnnnnnnnnnnnnnnnnnnnnnnnnnnnnnnnnnnnnnnnnnnnnnnnnnnnnnnnnnnnnnnnnnnnnnnnnnnnnnnnnnnnnnnnnnnnnnnnnnnnnnnnnnnnnnnnnnnnnnnnnnnnnnnnnnnnnnnnnnnnnnnnnnnnnnnnnnnnnnnnnnnnnnnnnnnnnnnnnnnnnnnnnnnnnnnnnnnnnnnnnnnnnnnnnnnnnnnnnnnnnnnnnnnnnnnnnnnnnnnnnnnnnnnnnnnnnnnnnnnnnnnnnnnnnnnnnnnnnnnnnnnnnnnnnnnnnnnnnnnnnnnnnnnnnnnnnnnnnnnnnnnnnnnnnnnnnnnnnnnnnnnnnnnnnnnnnnnnnnnnnnnnnnnnnnnnnnnnnnnnnnnnnnnnnnnnnnnnnnnnnnnnnnnnnnnnnnnnnnnnnnnnnnnnnnnnnnnnnnnnnnnnnnnnnnnnnnnnnnnnnnnnnnnnnnnnnnnnnnnnnnnnnnnnnnnnnnnnnnnnnnnnnnnnnnnnnnnnnnnnnnnnnnnnnnnnnnnnnnnnnnnnnnnnnnnnnnnnnnnnnnnnnnnnnnnnnnnnnnnnnnnnnnnnnnnnnnnnnnnnnnnnnnnnnnnnnnnnnnnnnnnnnnnnnnnnnnnnnnnnnnnnnnnnnnnnnnnnnnnnnnnnnnnnnnnnnnnnnnnnnnnnnnnnnnnnnnnnnnnnnnnnnnnnnnnnnnnnnnnnnnnnnnnnnnnnnnnnnnnnnnnnnnnnnnnnnnnnnnnnnnnnnnnnnnnnnnnnnnnnnnnnnnnnnnnnnnnnnnnnnnnnnnnnnnnnnnnnnnnnnnnnnnnnnnnnnnnnnnnnnnnnnnnnnnnnnnnnnnnnnnnnnnnnnnnnnnnnnnnnnnnnnnnnnnnnnnnnnnnnnnnnnnnnnnnnnnnnnnnnnnnnnnnnnnnnnnnnnnnnnnnnnnnnnnnnnnnnnnnnnnnnnnnnnnnnnnnnnnnnnnnnnnnnnnnnnnnnnnnnnnnnnnnnnnnnnnnnnnnnnnnnnnnnnnnnnnnnnnnnnnnnnnnnnnnnnnnnnnnnnnnnnnnnnnnnnnnnnnnnnnnnnnnnnnnnnnnnnnnnnnnnnnnnnnnnnnnnnnnnnnnnnnnnnnnnnnnnnnnnnnnnnnnnnnnnnnnnnnnnnnnnnnnnnnnnnnnnnnnnnnnnnnnnnnnnnnnnnnnnnnnnnnnnnnnnnnnnnnnnnnnnnnnnnnnnnnnnnnnnnnnnnnnnnnnnnnnnnnnnnnnnnnnnnnnnnnnnnnnnnnnnnnnnnnnnnnnnnnnnnnnnnnnnnnnnnnnnnnnnnnnnnnnnnnnnnnnnnnnnnnnnnnnnnnnnnnnnnnnnnnnnnnnnnnnnnnnnnnnnnnnnnnnnnnnnnnnnnnnnnnnnnnnnnnnnnnnnnnnnnnnnnnnnnnnnnnnnnnnnnnnnnnnnnnnnnnnnnnnnnnnnnnnnnnnnnnnnnnnnnnnnnnnnnnnnnnnnnnnnnnnnnnnnnnnnnnnnnnnnnnnnnnnnnnnnnnnnnnnnnnnnnnnnnnnnnnnnnnnnnnnnnnnnnnnnnnnnnnnnnnnnnnnnnnnnnnnnnnnnnnnnnnnnnnnnnnnnnnnnnnnnnnnnnnnnnnnnnnnnnnnnnnnnnnnnnnnnnnnnnnnnnnnnnnnnnnnnnnnnnnnnnnnnnnnnnnnnnnnnnnnnnnnnnnnnnnnnnnnnnnnnnnnnnnnnnnnnnnnnnnnnnnnnnnnnnnnnnnnnnnnnnnnnnnnnnnnnnnnnnnnnnnnnnnnnnnnnnnnnnnnnnnnnnnnnnnnnnnnnnnnnnnnnnnnnnnnnnnnnnnnnnnnnnnnnnnnnnnnnnnnnnnnnnnnnnnnnnnnnnnnnnnnnnnnnnnnnnnnnnnnnnnnnnnnnnnnnnnnnnnnnnnnnnnnnnnnnnnnnnnnnnnnnnnnnnnnnnnnnnnnnnnnnnnnnnnnnnnnnnnnnnnnnnnnnnnnnnnnnnnnnnnnnnnnnnnnnnnnnnnnnnnnnnnnnnnnnnnnnnnnnnnnnnnnnnnnnnnnnnnnnnnnnnnnnnnnnnnnnnnnnnnnnnnnnnnnnnnnnnnnnnnnnnnnnnnnnnnnnnnnnnnnnnnnnnnnnnnnnnnnnnnnnnnnnnnnnnnnnnnnnnnnnnnnnnnnnnnnnnnnnnnnnnnnnnnnnnnnnnnnnnnnnnnnnnnnnnnnnnnnnnnnnnnnnnnnnnnnnnnnnnnnnnnnnnnnnnnnnnnnnnnnnnnnnnnnnnnnnnnnnnnnnnnnnnnnnnnnnnnnnnnnnnnnnnnnnnnnnnnnnnnnnnnnnnnnnnnnnnnnnnnnnnnnnnnnnnnnnnnnnnnnnnnnnnnnnnnnnnnnnnnnnnnnnnnnnnnnnnnnnnnnnnnnnnnnnnnnnnnnnnnnnnnnnnnnnnnnnnnnnnnnnnnnnnnnnnnnnnnnnnnnnnnnnnnnnnnnnnnnnnnnnnnnnnnnnnnnnnnnnnnnnnnnnnnnnnnnnnnnnnnnnnnnnnnnnnnnnnnnnnnnnnnnnnnnnnnnnnnnnnnnnnnnnnnnnnnnnnnnnnnnnnnnnnnnnnnnnnnnnnnnnnnnnnnnnnnnnnnnnnnnnnnnnnnnnnnnnnnnnnnnnnnnnnnnnnnnnnnnnnnnnnnnnnnnnnnnnnnnnnnnnnnnnnnnnnnnnnnnnnnnnnnnnnnnnnnnnnnnnnnnnnnnnnnnnnnnnnnnnnnnnnnnnnnnnnnnnnnnnnnnnnnnnnnnnnnnnnnnnnnnnnnnnnnnnnnnnnnnnnnnnnnnnnnnnnnnnnnnnnnnnnnnnnnnnnnnnnnnnnnnnnnnnnnnnnnnnnnnnnnnnnnnnnnnnnnnnnnnnnnnnnnnnnnnnnnnnnnnnnnnnnnnnnnnnnnnnnnnnnnnnnnnnnnnnnnnnnnnnnnnnnnnnnnnnnnnnnnnnnnnnnnnnnnnnnnnnnnnnnnnnnnnnnnnnnnnnnnnnnnnnnnnnnnnnnnnnnnnnnnnnnnnnnnnnnnnnnnnnnnnnnnnnnnnnnnnnnnnnnnnnnnnnnnnnnnnnnnnnnnnnnnnnnnnnnnnnnnnnnnnnnnnnnnnnnnnnnnnnnnnnnnnnnnnnnnnnnnnnnnnnnnnnnnnnnnnnnnnnnnnnnnnnnnnnnnnnnnnnnnnnnnnnnnnnnnnnnnnnnnnnnnnnnnnnnnnnnnnnnnnnnnnnnnnnnnnnnnnnnnnnnnnnnnnnnnnnnnnnnnnnnnnnnnnnnnnnnnnnnnnnnnnnnnnnnnnnnnnnnnnnnnnnnnnnnnnnnnnnnnnnnnnnnnnnnnnnnnnnnnnnnnnnnnnnnnnnnnnnnnnnnnnnnnnnnnnnnnnnnnnnnnnnnnnnnnnnnnnnnnnnnnnnnnnnnnnnnnnnnnnnnnnnnnnnnnnnnnnnnnnnnnnnnnnnnnnnnnnnnnnnnnnnnnnnnnnnnnnnnnnnnnnnnnnnnnnnnnnnnnnnnnnnnnnnnnnnnnnnnnnnnnnnnnnnnnnnnnnnnnnnnnnnnnnnnnnnnnnnnnnnnnnnnnnnnnnnnnnnnnnnnnnnnnnnnnnnnnnnnnnnnnnnnnnnnnnnnnnnnnnnnnnnnnnnnnnnnnnnnnnnnnnnnnnnnnnnnnnnnnnnnnnnnnnnnnnnnnnnnnnnnnnnnnnnnnnnnnnnnnnnnnnnnnnnnnnnnnnnnnnnnnnnnnnnnnnnnnnnnnnnnnnnnnnnnnnnnnnnnnnnnnnnnnnnnnnnnnnnnnnnnnnnnnnnnnnnnnnnnnnnnnnnnnnnnnnnnnnnnnnnnnnnnnnnnnnnnnnnnnnnnnnnnnnnnnnnnnnnnnnnnnnnnnnnnnnnnnnnnnnnnnnnnnnnnnnnnnnnnnnnnnnnnnnnnnnnnnnnnnnnnnnnnnnnnnnnnnnnnnnnnnnnnnnnnnnnnnnnnnnnnnnnnnnnnnnnnnnnnnnnnnnnnnnnnnnnnnnnnnnnnnnnnnnnnnnnnnnnnnnnnnnnnnnnnnnnnnnnnnnnnnnnnnnnnnnnnnnnnnnnnnnnnnnnnnnnnnnnnnnnnnnnnnnnnnnnnnnnnnnnnnnnnnnnnnnnnnnnnnnnnnnnnnnnnnnnnnnnnnnnnnnnnnnnnnnnnnnnnnnnnnnnnnnnnnnnnnnnnnnnnnnnnnnnnnnnnnnnnnnnnnnnnnnnnnnnnnnnnnnnnnnnnnnnnnnnnnnnnnnnnnnnnnnnnnnnnnnnnnnnnnnnnnnnnnnnnnnnnnnnnnnnnnnnnnnnnnnnnnnnnnnnnnnnnnnnnnnnnnnnnnnnnnnnnnnnnnnnnnnnnnnnnnnnnnnnnnnnnnnnnnnnnnnnnnnnnnnnnnnnnnnnnnnnnnnnnnnnnnnnnnnnnnnnnnnnnnnnnnnnnnnnnnnnnnnnnnnnnnnnnnnnnnnnnnnnnnnnnnnnnnnnnnnnnnnnnnnnnnnnnnnnnnnnnnnnnnnnnnnnnnnnnnnnnnnnnnnnnnnnnnnnnnnnnnnnnnnnnnnnnnnnnnnnnnnnnnnnnnnnnnnnnnnnnnnnnnnnnnnnnnnnnnnnnnnnnnnnnnnnnnnnnnnnnnnnnnnnnnnnnnnnnnnnnnnnnnnnnnnnnnnnnnnnnnnnnnnnnnnnnnnnnnnnnnnnnnnnnnnnnnnnnnnnnnnnnnnnnnnnnnnnnnnnnnnnnnnnnnnnnnnnnnnnnnnnnnnnnnnnnnnnnnnnnnnnnnnnnnnnnnnnnnnnnnnnnnnnnnnnnnnnnnnnnnnnnnnnnnnnnnnnnnnnnnnnnnnnnnnnnnnnnnnnnnnnnnnnnnnnnnnnnnnnnnnnnnnnnnnnnnnnnnnnnnnnnnnnnnnnnnnnnnnnnnnnnnnnnnnnnnnnnnnnnnnnnnnnnnnnnnnnnnnnnnnnnnnnnnnnnnnnnnnnnnnnnnnnnnnnnnnnnnnnnnnnnnnnnnnnnnnnnnnnnnnnnnnnnnnnnnnnnnnnnnnnnnnnnnnnnnnnnnnnnnnnnnnnnnnnnnnnnnnnnnnnnnnnnnnnnnnnnnnnnnnnnnnnnnnnnnnnnnnnnnnnnnnnnnnnnnnnnnnnnnnnnnnnnnnnnnnnnnnnnnnnnnnnnnnnnnnnnnnnnnnnnnnnnnnnnnnnnnnnnnnnnnnnnnnnnnnnnnnnnnnnnnnnnnnnnnnnnnnnnnnnnnnnnnnnnnnnnnnnnnnnnnnnnnnnnnnnnnnnnnnnnnnnnnnnnnnnnnnnnnnnnnnnnnnnnnnnnnnnnnnnnnnnnnnnnnnnnnnnnnnnnnnnnnnnnnnnnnnnnnnnnnnnnnnnnnnnnnnnnnnnnnnnnnnnnnnnnnnnnnnnnnnnnnnnnnnnnnnnnnnnnnnnnnnnnnnnnnnnnnnnnnnnnnnnnnnnnnnnnnnnnnnnnnnnnnnnnnnnnnnnnnnnnnnnnnnnnnnnnnnnnnnnnnnnnnnnnnnnnnnnnnnnnnnnnnnnnnnnnnnnnnnnnnnnnnnnnnnnnnnnnnnnnnnnnnnnnnnnnnnnnnnnnnnnnnnnnnnnnnnnnnnnnnnnnnnnnnnnnnnnnnnnnnnnnnnnnnnnnnnnnnnnnnnnnnnnnnnnnnnnnnnnnnnnnnnnnnnnnnnnnnnnnnnnnnnnnnnnnnnnnnnnnnnnnnnnnnnnnnnnnnnnnnnnnnnnnnnnnnnnnnnnnnnnnnnnnnnnnnnnnnnnnnnnnnnnnnnnnnnnnnnnnnnnnnnnnnnnnnnnnnnnnnnnnnnnnnnnnnnnnnnnnnnnnnnnnnnnnnnnnnnnnnnnnnnnnnnnnnnnnnnnnnnnnnnnnnnnnnnnnnnnnnnnnnnnnnnnnnnnnnnnnnnnnnnnnnnnnnnnnnnnnnnnnnnnnnnnnnnnnnnnnnnnnnnnnnnnnnnnnnnnnnnnnnnnnnnnnnnnnnnnnnnnnnnnnnnnnnnnnnnnnnnnnnnnnnnnnnnnnnnnnnnnnnnnnnnnnnnnnnnnnnnnnnnnnnnnnnnnnnnnnnnnnnnnnnnnnnnnnnnnnnnnnnnnnnnnnnnnnnnnnnnnnnnnnnnnnnnnnnnnnnnnnnnnnnnnnnnnnnnnnnnnnnnnnnnnnnnnnnnnnnnnnnnnnnnnnnnnnnnnnnnnnnnnnnnnnnnnnnnnnnnnnnnnnnnnnnnnnnnnnnnnnnnnnnnnnnnnnnnnnnnnnnnnnnnnnnnnnnnnnnnnnnnnnnnnnnnnnnnnnnnnnnnnnnnnnnnnnnnnnnnnnnnnnnnnnnnnnnnnnnnnnnnnnnnnnnnnnnnnnnnnnnnnnnnnnnnnnnnnnnnnnnnnnnnnnnnnnnnnnnnnnnnnnnnnnnnnnnnnnnnnnnnnnnnnnnnnnnnnnnnnnnnnnnnnnnnnnnnnnnnnnnnnnnnnnnnnnnnnnnnnnnnnnnnnnnnnnnnnnnnnnnnnnnnnnnnnnnnnnnnnnnnnnnnnnnnnnnnnnnnnnnnnnnnnnnnnnnnnnnnnnnnnnnnnnnnnnnnnnnnnnnnnnnnnnnnnnnnnnnnnnnnnnnnnnnnnnnnnnnnnnnnnnnnnnnnnnnnnnnnnnnnnnnnnnnnnnnnnnnnnnnnnnnnnnnnnnnnnnnnnnnnnnnnnnnnnnnnnnnnnnnnnnnnnnnnnnnnnnnnnnnnnnnnnnnnnnnnnnnnnnnnnnnnnnnnnnnnnnnnnnnnnnnnnnnnnnnnnnnnnnnnnnnnnnnnnnnnnnnnnnnnnnnnnnnnnnnnnnnnnnnnnnnnnnnnnnnnnnnnnnnnnnnnnnnnnnnnnnnnnnnnnnnnnnnnnnnnnnnnnnnnnnnnnnnnnnnnnnnnnnnnnnnnnnnnnnnnnnnnnnnnnnnnnnnnnnnnnnnnnnnnnnnnnnnnnnnnnnnnnnnnnnnnnnnnnnnnnnnnnnnnnnnnnnnnnnnnnnnnnnnnnnnnnnnnnnnnnnnnnnnnnnnnnnnnnnnnnnnnnnnnnnnnnnnnnnnnnnnnnnnnnnnnnnnnnnnnnnnnnnnnnnnnnnnnnnnnnnnnnnnnnnnnnnnnnnnnnnnnnnnnnnnnnnnnnnnnnnnnnnnnnnnnnnnnnnnnnnnnnnnnnnnnnnnnnnnnnnnnnnnnnnnnnnnnnnnnnnnnnnnnnnnnnnnnnnnnnnnnnnnnnnnnnnnnnnnnnnnnnnnnnnnnnnnnnnnnnnnnnnnnnnnnnnnnnnnnnnnnnnnnnnnnnnnnnnnnnnnnnnnnnnnnnnnnnnnnnnnnnnnnnnnnnnnnnnnnnnnnnnnnnnnnnnnnnnnnnnnnnnnnnnnnnnnnnnnnnnnnnnnnnnnnnnnnnnnnnnnnnnnnnnnnnnnnnnnnnnnnnnnnnnnnnnnnnnnnnnnnnnnnnnnnnnnnnnnnnnnnnnnnnnnnnnnnnnnnnnnnnnnnnnnnnnnnnnnnnnnnnnnnnnnnnnnnnnnnnnnnnnnnnnnnnnnnnnnnnnnnnnnnnnnnnnnnnnnnnnnnnnnnnnnnnnnnnnnnnnnnnnnnnnnnnnnnnnnnnnnnnnnnnnnnnnnnnnnnnnnnnnnnnnnnnnnnnnnnnnnnnnnnnnnnnnnnnnnnnnnnnnnnnnnnnnnnnnnnnnnnnnnnnnnnnnnnnnnnnnnnnnnnnnnnnnnnnnnnnnnnnnnnnnnnnnnnnnnnnnnnnnnnnnnnnnnnnnnnnnnnnnnnnnnnnnnnnnnnnnnnnnnnnnnnnnnnnnnnnnnnnnnnnnnnnnnnnnnnnnnnnnnnnnnnnnnnnnnnnnnnnnnnnnnnnnnnnnnnnnnnnnnnnnnnnnnnnnnnnnnnnnnnnnnnnnnnnnnnnnnnnnnnnnnnnnnnnnnnnnnnnnnnnnnnnnnnnnnnnnnnnnnnnnnnnnnnnnnnnnnnnnnnnnnnnnnnnnnnnnnnnnnnnnnnnnnnnnnnnnnnnnnnnnnnnnnnnnnnnnnnnnnnnnnnnnnnnnnnnnnnnnnnnnnnnnnnnnnnnnnnnnnnnnnnnnnnnnnnnnnnnnnnnnnnnnnnnnnnnnnnnnnnnnnnnnnnnnnnnnnnnnnnnnnnnnnnnnnnnnnnnnnnnnnnnnnnnnnnnnnnnnnnnnnnnnnnnnnnnnnnnnnnnnnnnnnnnnnnnnnnnnnnnnnnnnnnnnnnnnnnnnnnnnnnnnnnnnnnnnnnnnnnnnnnnnnnnnnnnnnnnnnnnnnnnnnnnnnnnnnnnnnnnnnnnnnnnnnnnnnnnnnnnnnnnnnnnnnnnnnnnnnnnnnnnnnnnnnnnnnnnnnnnnnnnnnnnnnnnnnnnnnnnnnnnnnnnnnnnnnnnnnnnnnnnnnnnnnnnnnnnnnnnnnnnnnnnnnnnnnnnnnnnnnnnnnnnnnnnnnnnnnnnnnnnnnnnnnnnnnnnnnnnnnnnnnnnnnnnnnnnnnnnnnnnnnnnnnnnnnnnnnnnnnnnnnnnnnnnnnnnnnnnnnnnnnnnnnnnnnnnnnnnnnnnnnnnnnnnnnnnnnnnnnnnnnnnnnnnnnnnnnnnnnnnnnnnnnnnnnnnnnnnnnnnnnnnnnnnnnnnnnnnnnnnnnnnnnnnnnnnnnnnnnnnnnnnnnnnnnnnnnnnnnnnnnnnnnnnnnnnnnnnnnnnnnnnnnnnnnnnnnnnnnnnnnnnnnnnnnnnnnnnnnnnnnnnnnnnnnnnnnnnnnnnnnnnnnnnnnnnnnnnnnnnnnnnnnnnnnnnnnnnnnnnnnnnnnnnnnnnnnnnnnnnnnnnnnnnnnnnnnnnnnnnnnnnnnnnnnnnnnnnnnnnnnnnnnnnnnnnnnnnnnnnnnnnnnnnnnnnnnnnnnnnnnnnnnnnnnnnnnnnnnnnnnnnnnnnnnnnnnnnnnnnnnnnnnnnnnnnnnnnnnnnnnnnnnnnnnnnnnnnnnnnnnnnnnnnnnnnnnnnnnnnnnnnnnnnnnnnnnnnnnnnnnnnnnnnnnnnnnnnnnnnnnnnnnnnnnnnnnnnnnnnnnnnnnnnnnnnnnnnnnnnnnnnnnnnnnnnnnnnnnnnnnnnnnnnnnnnnnnnnnnnnnnnnnnnnnnnnnnnnnnnnnnnnnnnnnnnnnnnnnnnnnnnnnnnnnnnnnnnnnnnnnnnnnnnnnnnnnnnnnnnnnnnnnnnnnnnnnnnnnnnnnnnnnnnnnnnnnnnnnnnnnnnnnnnnnnnnnnnnnnnnnnnnnnnnnnnnnnnnnnnnnnnnnnnnnnnnnnnnnnnnnnnnnnnnnnnnnnnnnnnnnnnnnnnnnnnnnnnnnnnnnnnnnnnnnnnnnnnnnnnnnnnnnnnnnnnnnnnnnnnnnnnnnnnnnnnnnnnnnnnnnnnnnnnnnnnnnnnnnnnnnnnnnnnnnnnnnnnnnnnnnnnnnnnnnnnnnnnnnnnnnnnnnnnnnnnnnnnnnnnnnnnnnnnnnnnnnnnnnnnnnnnnnnnnnnnnnnnnnnnnnnnnnnnnnnnnnnnnnnnnnnnnnnnnnnnnnnnnnnnnnnnnnnnnnnnnnnnnnnnnnnnnnnnnnnnnnnnnnnnnnnnnnnnnnnnnnnnnnnnnnnnnnnnnnnnnnnnnnnnnnnnnnnnnnnnnnnnnnnnnnnnnnnnnnnnnnnnnnnnnnnnnnnnnnnnnnnnnnnnnnnnnnnnnnnnnnnnnnnnnnnnnnnnnnnnnnnnnnnnnnnnnnnnnnnnnnnnnnnnnnnnnnnnnnnnnnnnnnnnnnnnnnnnnnnnnnnnnnnnnnnnnnnnnnnnnnnnnnnnnnnnnnnnnnnnnnnnnnnnnnnnnnnnnnnnnnnnnnnnnnnnnnnnnnnnnnnnnnnnnnnnnnnnnnnnnnnnnnnnnnnnnnnnnnnnnnnnnnnnnnnnnnnnnnnnnnnnnnnnnnnnnnnnnnnnnnnnnnnnnnnnnnnnnnnnnnnnnnnnnnnnnnnnnnnnnnnnnnnnnnnnnnnnnnnnnnnnnnnnnnnnnnnnnnnnnnnnnnnnnnnnnnnnnnnnnnnnnnnnnnnnnnnnnnnnnnnnnnnnnnnnnnnnnnnnnnnnnnnnnnnnnnnnnnnnnnnnnnnnnnnnnnnnnnnnnnnnnnnnnnnnnnnnnnnnnnnnnnnnnnnnnnnnnnnnnnnnnnnnnnnnnnnnnnnnnnnnnnnnnnnnnnnnnnnnnnnnnnnnnnnnnnnnnnnnnnnnnnnnnnnnnnnnnnnnnnnnnnnnnnnnnnnnnnnnnnnnnnnnnnnnnnnnnnnnnnnnnnnnnnnnnnnnnnnnnnnnnnnnnnnnnnnnnnnnnnnnnnnnnnnnnnnnnnnnnnnnnnnnnnnnnnnnnnnnnnnnnnnnnnnnnnnnnnnnnnnnnnnnnnnnnnnnnnnnnnnnnnnnnnnnnnnnnnnnnnnnnnnnnnnnnnnnnnnnnnnnnnnnnnnnnnnnnnnnnnnnnnnnnnnnnnnnnnnnnnnnnnnnnnnnnnnnnnnnnnnnnnnnnnnnnnnnnnnnnnnnnnnnnnnnnnnnnnnnnnnnnnnnnnnnnnnnnnnnnnnnnnnnnnnnnnnnnnnnnnnnnnnnnnnnnnnnnnnnnnnnnnnnnnnnnnnnnnnnnnnnnnnnnnnnnnnnnnnnnnnnnnnnnnnnnnnnnnnnnnnnnnnnnnnnnnnnnnnnnnnnnnnnnnnnnnnnnnnnnnnnnnnnnnnnnnnnnnnnnnnnnnnnnnnnnnnnnnnnnnnnnnnnnnnnnnnnnnnnnnnnnnnnnnnnnnnnnnnnnnnnnnnnnnnnnnnnnnnnnnnnnnnnnnnnnnnnnnnnnnnnnnnnnnnnnnnnnnnnnnnnnnnnnnnnnnnnnnnnnnnnnnnnnnnnnnnnnnnnnnnnnnnnnnnnnnnnnnnnnnnnnnnnnnnnnnnnnnnnnnnnnnnnnnnnnnnnnnnnnnnnnnnnnnnnnnnnnnnnnnnnnnnnnnnnnnnnnnnnnnnnnnnnnnnnnnnnnnnnnnnnnnnnnnnnnnnnnnnnnnnnnnnnnnnnnnnnnnnnnnnnnnnnnnnnnnnnnnnnnnnnnnnnnnnnnnnnnnnnnnnnnnnnnnnnnnnnnnnnnnnnnnnnnnnnnnnnnnnnnnnnnnnnnnnnnnnnnnnnnnnnnnnnnnnnnnnnnnnnnnnnnnnnnnnnnnnnnnnnnnnnnnnnnnnnnnnnnnnnnnnnnnnnnnnnnnnnnnnnnnnnnnnnnnnnnnnnnnnnnnnnnnnnnnnnnnnnnnnnnnnnnnnnnnnnnnnnnnnnnnnnnnnnnnnnnnnnnnnnnnnnnnnnnnnnnnnnnnnnnnnnnnnnnnnnnnnnnnnnnnnnnnnnnnnnnnnnnnnnnnnnnnnnnnnnnnnnnnnnnnnnnnnnnnnnnnnnnnnnnnnnnnnnnnnnnnnnnnnnnnnnnnnnnnnnnnnnnnnnnnnnnnnnnnnnnnnnnnnnnnnnnnnnnnnnnnnnnnnnnnnnnnnnnnnnnnnnnnnnnnnnnnnnnnnnnnnnnnnnnnnnnnnnnnnnnnnnnnnnnnnnnnnnnnnnnnnnnnnnnnnnnnnnnnnnnnnnnnnnnnnnnnnnnnnnnnnnnnnnnnnnnnnnnnnnnnnnnnnnnnnnnnnnnnnnnnnnnnnnnnnnnnnnnnnnnnnnnnnnnnnnnnnnnnnnnnnnnnnnnnnnnnnnnnnnnnnnnnnnnnnnnnnnnnnnnnnnnnnnnnnnnnnnnnnnnnnnnnnnnnnnnnnnnnnnnnnnnnnnnnnnnnnnnnnnnnnnnnnnnnnnnnnnnnnnnnnnnnnnnnnnnnnnnnnnnnnnnnnnnnnnnnnnnnnnnnnnnnnnnnnnnnnnnnnnnnnnnnnnnnnnnnnnnnnnnnnnnnnnnnnnnnnnnnnnnnnnnnnnnnnnnnnnnnnnnnnnnnnnnnnnnnnnnnnnnnnnnnnnnnnnnnnnnnnnnnnnnnnnnnnnnnnnnnnnnnnnnnnnnnnnnnnnnnnnnnnnnnnnnnnnnnnnnnnnnnnnnnnnnnnnnnnnnnnnnnnnnnnnnnnnnnnnnnnnnnnnnnnnnnnnnnnnnnnnnnnnnnnnnnnnnnnnnnnnnnnnnnnnnnnnnnnnnnnnnnnnnnnnnnnnnnnnnnnnnnnnnnnnnnnnnnnnnnnnnnnnnnnnnnnnnnnnnnnnnnnnnnnnnnnnnnnnnnnnnnnnnnnnnnnnnnnnnnnnnnnnnnnnnnnnnnnnnnnnnnnnnnnnnnnnnnnnnnnnnnnnnnnnnnnnnnnnnnnnnnnnnnnnnnnnnnnnnnnnnnnnnnnnnnnnnnnnnnnnnnnnnnnnnnnnnnnnnnnnnnnnnnnnnnnnnnnnnnnnnnnnnnnnnnnnnnnnnnnnnnnnnnnnnnnnnnnnnnnnnnnnnnnnnnnnnnnnnnnnnnnnnnnnnnnnnnnnnnnnnnnnnnnnnnnnnnnnnnnnnnnnnnnnnnnnnnnnnnnnnnnnnnnnnnnnnnnnnnnnnnnnnnnnnnnnnnnnnnnnnnnnnnnnnnnnnnnnnnnnnnnnnnnnnnnnnnnnnnnnnnnnnnnnnnnnnnnnnnnnnnnnnnnnnnnnnnnnnnnnnnnnnnnnnnnnnnnnnnnnnnnnnnnnnnnnnnnnnnnnnnnnnnnnnnnnnnnnnnnnnnnnnnnnnnnnnnnnnnnnnnnnnnnnnnnnnnnnnnnnnnnnnnnnnnnnnnnnnnnnnnnnnnnnnnnnnnnnnnnnnnnnnnnnnnnnnnnnnnnnnnnnnnnnnnnnnnnnnnnnnnnnnnnnnnnnnnnnnnnnnnnnnnnnnnnnnnnnnnnnnnnnnnnnnnnnnnnnnnnnnnnnnnnnnnnnnnnnnnnnnnnnnnnnnnnnnnnnnnnnnnnnnnnnnnnnnnnnnnnnnnnnnnnnnnnnnnnnnnnnnnnnnnnnnnnnnnnnnnnnnnnnnnnnnnnnnnnnnnnnnnnnnnnnnnnnnnnnnnnnnnnnnnnnnnnnnnnnnnnnnnnnnnnnnnnnnnnnnnnnnnnnnnnnnnnnnnnnnnnnnnnnnnnnnnnnnnnnnnnnnnnnnnnnnnnnnnnnnnnnnnnnnnnnnnnnnnnnnnnnnnnnnnnnnnnnnnnnnnnnnnnnnnnnnnnnnnnnnnnnnnnnnnnnnnnnnnnnnnnnnnnnnnnnnnnnnnnnnnnnnnnnnnnnnnnnnnnnnnnnnnnnnnnnnnnnnnnnnnnnnnnnnnnnnnnnnnnnnnnnnnnnnnnnnnnnnnnnnnnnnnnnnnnnnnnnnnnnnnnnnnnnnnnnnnnnnnnnnnnnnnnnnnnnnnnnnnnnnnnnnnnnnnnnnnnnnnnnnnnnnnnnnnnnnnnnnnnnnnnnnnnnnnnnnnnnnnnnnnnnnnnnnnnnnnnnnnnnnnnnnnnnnnnnnnnnnnnnnnnnnnnnnnnnnnnnnnnnnnnnnnnnnnnnnnnnnnnnnnnnnnnnnnnnnnnnnnnnnnnnnnnnnnnnnnnnnnnnnnnnnnnnnnnnnnnnnnnnnnnnnnnnnnnnnnnnnnnnnnnnnnnnnnnnnnnnnnnnnnnnnnnnnnnnnnnnnnnnnnnnnnnnnnnnnnnnnnnnnnnnnnnnnnnnnnnnnnnnnnnnnnnnnnnnnnnnnnnnnnnnnnnnnnnnnnnnnnnnnnnnnnnnnnnnnnnnnnnnnnnnnnnnnnnnnnnnnnnnnnnnnnnnnnnnnnnnnnnnnnnnnnnnnnnnnnnnnnnnnnnnnnnnnnnnnnnnnnnnnnnnnnnnnnnnnnnnnnnnnnnnnnnnnnnnnnnnnnnnnnnnnnnnnnnnnnnnnnnnnnnnnnnnnnnnnnnnnnnnnnnnnnnnnnnnnnnnnnnnnnnnnnnnnnnnnnnnnnnnnnnnnnnnnnnnnnnnnnnnnnnnnnnnnnnnnnnnnnnnnnnnnnnnnnnnnnnnnnnnnnnnnnnnnnnnnnnnnnnnnnnnnnnnnnnnnnnnnnnnnnnnnnnnnnnnnnnnnnnnnnnnnnnnnnnnnnnnnnnnnnnnnnnnnnnnnnnnnnnnnnnnnnnnnnnnnnnnnnnnnnnnnnnnnnnnnnnnnnnnnnnnnnnnnnnnnnnnnnnnnnnnnnnnnnnnnnnnnnnnnnnnnnnnnnnnnnnnnnnnnnnnnnnnnnnnnnnnnnnnnnnnnnnnnnnnnnnnnnnnnnnnnnnnnnnnnnnnnnnnnnnnnnnnnnnnnnnnnnnnnnnnnnnnnnnnnnnnnnnnnnnnnnnnnnnnnnnnnnnnnnnnnnnnnnnnnnnnnnnnnnnnnnnnnnnnnnnnnnnnnnnnnnnnnnnnnnnnnnnnnnnnnnnnnnnnnnnnnnnnnnnnnnnnnnnnnnnnnnnnnnnnnnnnnnnnnnnnnnnnnnnnnnnnnnnnnnnnnnnnnnnnnnnnnnnnnnnnnnnnnnnnnnnnnnnnnnnnnnnnnnnnnnnnnnnnnnnnnnnnnnnnnnnnnnnnnnnnnnnnnnnnnnnnnnnnnnnnnnnnnnnnnnnnnnnnnnnnnnnnnnnnnnnnnnnnnnnnnnnnnnnnnnnnnnnnnnnnnnnnnnnnnnnnnnnnnnnnnnnnnnnnnnnnnnnnnnnnnnnnnnnnnnnnnnnnnnnnnnnnnnnnnnnnnnnnnnnnnnnnnnnnnnnnnnnnnnnnnnnnnnnnnnnnnnnnnnnnnnnnnnnnnnnnnnnnnnnnnnnnnnnnnnnnnnnnnnnnnnnnnnnnnnnnnnnnnnnnnnnnnnnnnnnnnnnnnnnnnnnnnnnnnnnnnnnnnnnnnnnnnnnnnnnnnnnnnnnnnnnnnnnnnnnnnnnnnnnnnnnnnnnnnnnnnnnnnnnnnnnnnnnnnnnnnnnnnnnnnnnnnnnnnnnnnnnnnnnnnnnnnnnnnnnnnnnnnnnnnnnnnnnnnnnnnnnnnnnnnnnnnnnnnnnnnnnnnnnnnnnnnnnnnnnnnnnnnnnnnnnnnnnnnnnnnnnnnnnnnnnnnnnnnnnnnnnnnnnnnnnnnnnnnnnnnnnnnnnnnnnnnnnnnnnnnnnnnnnnnnnnnnnnnnnnnnnnnnnnnnnnnnnnnnnnnnnnnnnnnnnnnnnnnnnnnnnnnnnnnnnnnnnnnnnnnnnnnnnnnnnnnnnnnnnnnnnnnnnnnnnnnnnnnnnnnnnnnnnnnnnnnnnnnnnnnnnnnnnnnnnnnnnnnnnnnnnnnnnnnnnnnnnnnnnnnnnnnnnnnnnnnnnnnnnnnnnnnnnnnnnnnnnnnnnnnnnnnnnnnnnnnnnnnnnnnnnnnnnnnnnnnnnnnnnnnnnnnnnnnnnnnnnnnnnnnnnnnnnnnnnnnnnnnnnnnnnnnnnnnnnnnnnnnnnnnnnnnnnnnnnnnnnnnnnnnnnnnnnnnnnnnnnnnnnnnnnnnnnnnnnnnnnnnnnnnnnnnnnnnnnnnnnnnnnnnnnnnnnnnnnnnnnnnnnnnnnnnnnnnnnnnnnnnnnnnnnnnnnnnnnnnnnnnnnnnnnnnnnnnnnnnnnnnnnnnnnnnnnnnnnnnnnnnnnnnnnnnnnnnnnnnnnnnnnnnnnnnnnnnnnnnnnnnnnnnnnnnnnnnnnnnnnnnnnnnnnnnnnnnnnnnnnnnnnnnnnnnnnnnnnnnnnnnnnnnnnnnnnnnnnnnnnnnnnnnnnnnnnnnnnnnnnnnnnnnnnnnnnnnnnnnnnnnnnnnnnnnnnnnnnnnnnnnnnnnnnnnnnnnnnnnnnnnnnnnnnnnnnnnnnnnnnnnnnnnnnnnnnnnnnnnnnnnnnnnnnnnnnnnnnnnnnnnnnnnnnnnnnnnnnnnnnnnnnnnnnnnnnnnnnnnnnnnnnnnnnnnnnnnnnnnnnnnnnnnnnnnnnnnnnnnnnnnnnnnnnnnnnnnnnnnnnnnnnnnnnnnnnnnnnnnnnnnnnnnnnnnnnnnnnnnnnnnnnnnnnnnnnnnnnnnnnnnnnnnnnnnnnnnnnnnnnnnnnnnnnnnnnnnnnnnnnnnnnnnnnnnnnnnnnnnnnnnnnnnnnnnnnnnnnnnnnnnnnnnnnnnnnnnnnnnnnnnnnnnnnnnnnnnnnnnnnnnnnnnnnnnnnnnnnnnnnnnnnnnnnnnnnnnnnnnnnnnnnnnnnnnnnnnnnnnnnnnnnnnnnnnnnnnnnnnnnnnnnnnnnnnnnnnnnnnnnnnnnnnnnnnnnnnnnnnnnnnnnnnnnnnnnnnnnnnnnnnnnnnnnnnnnnnnnnnnnnnnnnnnnnnnnnnnnnnnnnnnnnnnnnnnnnnnnnnnnnnnnnnnnnnnnnnnnnnnnnnnnnnnnnnnnnnnnnnnnnnnnnnnnnnnnnnnnnnnnnnnnnnnnnnnnnnnnnnnnnnnnnnnnnnnnnnnnnnnnnnnnnnnnnnnnnnnnnnnnnnnnnnnnnnnnnnnnnnnnnnnnnnnnnnnnnnnnnnnnnnnnnnnnnnnnnnnnnnnnnnnnnnnnnnnnnnnnnnnnnnnnnnnnnnnnnnnnnnnnnnnnnnnnnnnnnnnnnnnnnnnnnnnnnnnnnnnnnnnnnnnnnnnnnnnnnnnnnnnnnnnnnnnnnnnnnnnnnnnnnnnnnnnnnnnnnnnnnnnnnnnnnnnnnnnnnnnnnnnnnnnnnnnnnnnnnnnnnnnnnnnnnnnnnnnnnnnnnnnnnnnnnnnnnnnnnnnnnnnnnnnnnnnnnnnnnnnnnnnnnnnnnnnnnnnnnnnnnnnnnnnnnnnnnnnnnnnnnnnnnnnnnnnnnnnnnnnnnnnnnnnnnnnnnnnnnnnnnnnnnnnnnnnnnnnnnnnnnnnnnnnnnnnnnnnnnnnnnnnnnnnnnnnnnnnnnnnnnnnnnnnnnnnnnnnnnnnnnnnnnnnnnnnnnnnnnnnnnnnnnnnnnnnnnnnnnnnnnnnnnnnnnnnnnnnnnnnnnnnnnnnnnnnnnnnnnnnnnnnnnnnnnnnnnnnnnnnnnnnnnnnnnnnnnnnnnnnnnnnnnnnnnnnnnnnnnnnnnnnnnnnnnnnnnnnnnnnnnnnnnnnnnnnnnnnnnnnnnnnnnnnnnnnnnnnnnnnnnnnnnnnnnnnnnnnnnnnnnnnnnnnnnnnnnnnnnnnnnnnnnnnnnnnnnnnnnnnnnnnnnnnnnnnnnnnnnnnnnnnnnnnnnnnnnnnnnnnnnnnnnnnnnnnnnnnnnnnnnnnnnnnnnnnnnnnnnnnnnnnnnnnnnnnnnnnnnnnnnnnnnnnnnnnnnnnnnnnnnnnnnnnnnnnnnnnnnnnnnnnnnnnnnnnnnnnnnnnnnnnnnnnnnnnnnnnnnnnnnnnnnnnnnnnnnnnnnnnnnnnnnnnnnnnnnnnnnnnnnnnnnnnnnnnnnnnnnnnnnnnnnnnnnnnnnnnnnnnnnnnnnnnnnnnnnnnnnnnnnnnnnnnnnnnnnnnnnnnnnnnnnnnnnnnnnnnnnnnnnnnnnnnnnnnnnnnnnnnnnnnnnnnnnnnnnnnnnnnnnnnnnnnnnnnnnnnnnnnnnnnnnnnnnnnnnnnnnnnnnnnnnnnnnnnnnnnnnnnnnnnnnnnnnnnnnnnnnnnnnnnnnnnnnnnnnnnnnnnnnnnnnnnnnnnnnnnnnnnnnnnnnnnnnnnnnnnnnnnnnnnnnnnnnnnnnnnnnnnnnnnnnnnnnnnnnnnnnnnnnnnnnnnnnnnnnnnnnnnnnnnnnnnnnnnnnnnnnnnnnnnnnnnnnnnnnnnnnnnnnnnnnnnnnnnnnnnnnnnnnnnnnnnnnnnnnnnnnnnnnnnnnnnnnnnnnnnnnnnnnnnnnnnnnnnnnnnnnnnnnnnnnnnnnnnnnnnnnnnnnnnnnnnnnnnnnnnnnnnnnnnnnnnnnnnnnnnnnnnnnnnnnnnnnnnnnnnnnnnnnnnnnnnnnnnnnnnnnnnnnnnnnnnnnnnnnnnnnnnnnnnnnnnnnnnnnnnnnnnnnnnnnnnnnnnnnnnnnnnnnnnnnnnnnnnnnnnnnnnnnnnnnnnnnnnnnnnnnnnnnnnnnnnnnnnnnnnnnnnnnnnnnnnnnnnnnnnnnnnnnnnnnnnnnnnnnnnnnnnnnnnnnnnnnnnnnnnnnnnnnnnnnnnnnnnnnnnnnnnnnnnnnnnnnnnnnnnnnnnnnnnnnnnnnnnnnnnnnnnnnnnnnnnnnnnnnnnnnnnnnnnnnnnnnnnnnnnnnnnnnnnnnnnnnnnnnnnnnnnnnnnnnnnnnnnnnnnnnnnnnnnnnnnnnnnnnnnnnnnnnnnnnnnnnnnnnnnnnnnnnnnnnnnnnnnnnnnnnnnnnnnnnnnnnnnnnnnnnnnnnnnnnnnnnnnnnnnnnnnnnnnnnnnnnnnnnnnnnnnnnnnnnnnnnnnnnnnnnnnnnnnnnnnnnnnnnnnnnnnnnnnnnnnnnnnnnnnnnnnnnnnnnnnnnnnnnnnnnnnnnnnnnnnnnnnnnnnnnnnnnnnnnnnnnnnnnnnnnnnnnnnnnnnnnnnnnnnnnnnnnnnnnnnnnnnnnnnnnnnnnnnnnnnnnnnnnnnnnnnnnnnnnnnnnnnnnnnnnnnnnnnnnnnnnnnnnnnnnnnnnnnnnnnnnnnnnnnnnnnnnnnnnnnnnnnnnnnnnnnnnnnnnnnnnnnnnnnnnnnnnnnnnnnnnnnnnnnnnnnnnnnnnnnnnnnnnnnnnnnnnnnnnnnnnnnnnnnnnnnnnnnnnnnnnnnnnnnnnnnnnnnnnnnnnnnnnnnnnnnnnnnnnnnnnnnnnnnnnnnnnnnnnnnnnnnnnnnnnnnnnnnnnnnnnnnnnnnnnnnnnnnnnnnnnnnnnnnnnnnnnnnnnnnnnnnnnnnnnnnnnnnnnnnnnnnnnnnnnnnnnnnnnnnnnnnnnnnnnnnnnnnnnnnnnnnnnnnnnnnnnnnnnnnnnnnnnnnnnnnnnnnnnnnnnnnnnnnnnnnnnnnnnnnnnnnnnnnnnnnnnnnnnnnnnnnnnnnnnnnnnnnnnnnnnnnnnnnnnnnnnnnnnnnnnnnnnnnnnnnnnnnnnnnnnnnnnnnnnnnnnnnnnnnnnnnnnnnnnnnnnnnnnnnnnnnnnnnnnnnnnnnnnnnnnnnnnnnnnnnnnnnnnnnnnnnnnnnnnnnnnnnnnnnnnnnnnnnnnnnnnnnnnnnnnnnnnnnnnnnnnnnnnnnnnnnnnnnnnnnnnnnnnnnnnnnnnnnnnnnnnnnnnnnnnnnnnnnnnnnnnnnnnnnnnnnnnnnnnnnnnnnnnnnnnnnnnnnnnnnnnnnnnnnnnnnnnnnnnnnnnnnnnnnnnnnnnnnnnnnnnnnnnnnnnnnnnnnnnnnnnnnnnnnnnnnnnnnnnnnnnnnnnnnnnnnnnnnnnnnnnnnnnnnnnnnnnnnnnnnnnnnnnnnnnnnnnnnnnnnnnnnnnnnnnnnnnnnnnnnnnnnnnnnnnnnnnnnnnnnnnnnnnnnnnnnnnnnnnnnnnnnnnnnnnnnnnnnnnnnnnnnnnnnnnnnnnnnnnnnnnnnnnnnnnnnnnnnnnnnnnnnnnnnnnnnnnnnnnnnnnnnnnnnnnnnnnnnnnnnnnnnnnnnnnnnnnnnnnnnnnnnnnnnnnnnnnnnnnnnnnnnnnnnnnnnnnnnnnnnnnnnnnnnnnnnnnnnnnnnnnnnnnnnnnnnnnnnnnnnnnnnnnnnnnnnnnnnnnnnnnnnnnnnnnnnnnnnnnnnnnnnnnnnnnnnnnnnnnnnnnnnnnnnnnnnnnnnnnnnnnnnnnnnnnnnnnnnnnnnnnnnnnnnnnnnnnnnnnnnnnnnnnnnnnnnnnnnnnnnnnnnnnnnnnnnnnnnnnnnnnnnnnnnnnnnnnnnnnnnnnnnnnnnnnnnnnnnnnnnnnnnnnnnnnnnnnnnnnnnnnnnnnnnnnnnnnnnnnnnnnnnnnnnnnnnnnnnnnnnnnnnnnnnnnnnnnnnnnnnnnnnnnnnnnnnnnnnnnnnnnnnnnnnnnnnnnnnnnnnnnnnnnnnnnnnnnnnnnnnnnnnnnnnnnnnnnnnnnnnnnnnnnnnnnnnnnnnnnnnnnnnnnnnnnnnnnnnnnnnnnnnnnnnnnnnnnnnnnnnnnnnnnnnnnnnnnnnnnnnnnnnnnnnnnnnnnnnnnnnnnnnnnnnnnnnnnnnnnnnnnnnnnnnnnnnnnnnnnnnnnnnnnnnnnnnnnnnnnnnnnnnnnnnnnnnnnnnnnnnnnnnnnnnnnnnnnnnnnnnnnnnnnnnnnnnnnnnnnnnnnnnnnnnnnnnnnnnnnnnnnnnnnnnnnnnnnnnnnnnnnnnnnnnnnnnnnnnnnnnnnnnnnnnnnnnnnnnnnnnnnnnnnnnnnnnnnnnnnnnnnnnnnnnnnnnnnnnnnnnnnnnnnnnnnnnnnnnnnnnnnnnnnnnnnnnnnnnnnnnnnnnnnnnnnnnnnnnnnnnnnnnnnnnnnnnnnnnnnnnnnnnnnnnnnnnnnnnnnnnnnnnnnnnnnnnnnnnnnnnnnnnnnnnnnnnnnnnnnnnnnnnnnnnnnnnnnnnnnnnnnnnnnnnnnnnnnnnnnnnnnnnnnnnnnnnnnnnnnnnnnnnnnnnnnnnnnnnnnnnnnnnnnnnnnnnnnnnnnnnnnnnnnnnnnnnnnnnnnnnnnnnnnnnnnnnnnnnnnnnnnnnnnnnnnnnnnnnnnnnnnnnnnnnnnnnnnnnnnnnnnnnnnnnnnnnnnnnnnnnnnnnnnnnnnnnnnnnnnnnnnnnnnnnnnnnnnnnnnnnnnnnnnnnnnnnnnnnnnnnnnnnnnnnnnnnnnnnnnnnnnnnnnnnnnnnnnnnnnnnnnnnnnnnnnnnnnnnnnnnnnnnnnnnnnnnnnnnnnnnnnnnnnnnnnnnnnnnnnnnnnnnnnnnnnnnnnnnnnnnnnnnnnnnnnnnnnnnnnnnnnnnnnnnnnnnnnnnnnnnnnnnnnnnnnnnnnnnnnnnnnnnnnnnnnnnnnnnnnnnnnnnnnnnnnnnnnnnnnnnnnnnnnnnnnnnnnnnnnnnnnnnnnnnnnnnnnnnnnnnnnnnnnnnnnnnnnnnnnnnnnnnnnnnnnnnnnnnnnnnnnnnnnnnnnnnnnnnnnnnnnnnnnnnnnnnnnnnnnnnnnnnnnnnnnnnnnnnnnnnnnnnnnnnnnnnnnnnnnnnnnnnnnnnnnnnnnnnnnnnnnnnnnnnnnnnnnnnnnnnnnnnnnnnnnnnnnnnnnnnnnnnnnnnnnnnnnnnnnnnnnnnnnnnnnnnnnnnnnnnnnnnnnnnnnnnnnnnnnnnnnnnnnnnnnnnnnnnnnnnnnnnnnnnnnnnnnnnnnnnnnnnnnnnnnnnnnnnnnnnnnnnnnnnnnnnnnnnnnnnnnnnnnnnnnnnnnnnnnnnnnnnnnnnnnnnnnnnnnnnnnnnnnnnnnnnnnnnnnnnnnnnnnnnnnnnnnnnnnnnnnnnnnnnnnnnnnnnnnnnnnnnnnnnnnnnnnnnnnnnnnnnnnnnnnnnnnnnnnnnnnnnnnnnnnnnnnnnnnnnnnnnnnnnnnnnnnnnnnnnnnnnnnnnnnnnnnnnnnnnnnnnnnnnnnnnnnnnnnnnnnnnnnnnnnnnnnnnnnnnnnnnnnnnnnnnnnnnnnnnnnnnnnnnnnnnnnnnnnnnnnnnnnnnnnnnnnnnnnnnnnnnnnnnnnnnnnnnnnnnnnnnnnnnnnnnnnnnnnnnnnnnnnnnnnnnnnnnnnnnnnnnnnnnnnnnnnnnnnnnnnnnnnnnnnnnnnnnnnnnnnnnnnnnnnnnnnnnnnnnnnnnnnnnnnnnnnnnnnnnnnnnnnnnnnnnnnnnnnnnnnnnnnnnnnnnnnnnnnnnnnnnnnnnnnnnnnnnnnnnnnnnnnnnnnnnnnnnnnnnnnnnnnnnnnnnnnnnnnnnnnnnnnnnnnnnnnnnnnnnnnnnnnnnnnnnnnnnnnnnnnnnnnnnnnnnnnnnnnnnnnnnnnnnnnnnnnnnnnnnnnnnnnnnnnnnnnnnnnnnnnnnnnnnnnnnnnnnnnnnnnnnnnnnnnnnnnnnnnnnnnnnnnnnnnnnnnnnnnnnnnnnnnnnnnnnnnnnnnnnnnnnnnnnnnnnnnnnnnnnnnnnnnnnnnnnnnnnnnnnnnnnnnnnnnnnnnnnnnnnnnnnnnnnnnnnnnnnnnnnnnnnnnnnnnnnnnnnnnnnnnnnnnnnnnnnnnnnnnnnnnnnnnnnnnnnnnnnnnnnnnnnnnnnnnnnnnnnnnnnnnnnnnnnnnnnnnnnnnnnnnnnnnnnnnnnnnnnnnnnnnnnnnnnnnnnnnnnnnnnnnnnnnnnnnnnnnnnnnnnnnnnnnnnnnnnnnnnnnnnnnnnnnnnnnnnnnnnnnnnnnnnnnnnnnnnnnnnnnnnnnnnnnnnnnnnnnnnnnnnnnnnnnnnnnnnnnnnnnnnnnnnnnnnnnnnnnnnnnnnnnnnnnnnnnnnnnnnnnnnnnnnnnnnnnnnnnnnnnnnnnnnnnnnnnnnnnnnnnnnnnnnnnnnnnnnnnnnnnnnnnnnnnnnnnnnnnnnnnnnnnnnnnnnnnnnnnnnnnnnnnnnnnnnnnnnnnnnnnnnnnnnnnnnnnnnnnnnnnnnnnnnnnnnnnnnnnnnnnnnnnnnnnnnnnnnnnnnnnnnnnnnnnnnnnnnnnnnnnnnnnnnnnnnnnnnnnnnnnnnnnnnnnnnnnnnnnnnnnnnnnnnnnnnnnnnnnnnnnnnnnnnnnnnnnnnnnnnnnnnnnnnnnnnnnnnnnnnnnnnnnnnnnnnnnnnnnnnnnnnnnnnnnnnnnnnnnnnnnnnnnnnnnnnnnnnnnnnnnnnnnnnnnnnnnnnnnnnnnnnnnnnnnnnnnnnnnnnnnnnnnnnnnnnnnnnnnnnnnnnnnnnnnnnnnnnnnnnnnnnnnnnnnnnnnnnnnnnnnnnnnnnnnnnnnnnnnnnnnnnnnnnnnnnnnnnnnnnnnnnnnnnnnnnnnnnnnnnnnnnnnnnnnnnnnnnnnnnnnnnnnnnnnnnnnnnnnnnnnnnnnnnnnnnnnnnnnnnnnnnnnnnnnnnnnnnnnnnnnnnnnnnnnnnnnnnnnnnnnnnnnnnnnnnnnnnnnnnnnnnnnnnnnnnnnnnnnnnnnnnnnnnnnnnnnnnnnnnnnnnnnnnnnnnnnnnnnnnnnnnnnnnnnnnnnnnnnnnnnnnnnnnnnnnnnnnnnnnnnnnnnnnnnnnnnnnnnnnnnnnnnnnnnnnnnnnnnnnnnnnnnnnnnnnnnnnnnnnnnnnnnnnnnnnnnnnnnnnnnnnnnnnnnnnnnnnnnnnnnnnnnnnnnnnnnnnnnnnnnnnnnnnnnnnnnnnnnnnnnnnnnnnnnnnnnnnnnnnnnnnnnnnnnnnnnnnnnnnnnnnnnnnnnnnnnnnnnnnnnnnnnnnnnnnnnnnnnnnnnnnnnnnnnnnnnnnnnnnnnnnnnnnnnnnnnnnnnnnnnnnnnnnnnnnnnnnnnnnnnnnnnnnnnnnnnnnnnnnnnnnnnnnnnnnnnnnnnnnnnnnnnnnnnnnnnnnnnnnnnnnnnnnnnnnnnnnnnnnnnnnnnnnnnnnnnnnnnnnnnnnnnnnnnnnnnnnnnnnnnnnnnnnnnnnnnnnnnnnnnnnnnnnnnnnnnnnnnnnnnnnnnnnnnnnnnnnnnnnnnnnnnnnnnnnnnnnnnnnnnnnnnnnnnnnnnnnnnnnnnnnnnnnnnnnnnnnnnnnnnnnnnnnnnnnnnnnnnnnnnnnnnnnnnnnnnnnnnnnnnnnnnnnnnnnnnnnnnnnnnnnnnnnnnnnnnnnnnnnnnnnnnnnnnnnnnnnnnnnnnnnnnnnnnnnnnnnnnnnnnnnnnnnnnnnnnnnnnnnnnnnnnnnnnnnnnnnnnnnnnnnnnnnnnnnnnnnnnnnnnnnnnnnnnnnnnnnnnnnnnnnnnnnnnnnnnnnnnnnnnnnnnnnnnnnnnnnnnnnnnnnnnnnnnnnnnnnnnnnnnnnnnnnnnnnnnnnnnnnnnnnnnnnnnnnnnnnnnnnnnnnnnnnnnnnnnnnnnnnnnnnnnnnnnnnnnnnnnnnnnnnnnnnnnnnnnnnnnnnnnnnnnnnnnnnnnnnnnnnnnnnnnnnnnnnnnnnnnnnnnnnnnnnnnnnnnnnnnnnnnnnnnnnnnnnnnnnnnnnnnnnnnnnnnnnnnnnnnnnnnnnnnnnnnnnnnnnnnnnnnnnnnnnnnnnnnnnnnnnnnnnnnnnnnnnnnnnnnnnnnnnnnnnnnnnnnnnnnnnnnnnnnnnnnnnnnnnnnnnnnnnnnnnnnnnnnnnnnnnnnnnnnnnnnnnnnnnnnnnnnnnnnnnnnnnnnnnnnnnnnnnnnnnnnnnnnnnnnnnnnnnnnnnnnnnnnnnnnnnnnnnnnnnnnnnnnnnnnnnnnnnnnnnnnnnnnnnnnnnnnnnnnnnnnnnnnnnnnnnnnnnnnnnnnnnnnnnnnnnnnnnnnnnnnnnnnnnnnnnnnnnnnnnnnnnnnnnnnnnnnnnnnnnnnnnnnnnnnnnnnnnnnnnnnnnnnnnnnnnnnnnnnnnnnnnnnnnnnnnnnnnnnnnnnnnnnnnnnnnnnnnnnnnnnnnnnnnnnnnnnnnnnnnnnnnnnnnnnnnnnnnnnnnnnnnnnnnnnnnnnnnnnnnnnnnnnnnnnnnnnnnnnnnnnnnnnnnnnnnnnnnnnnnnnnnnnnnnnnnnnnnnnnnnnnnnnnnnnnnnnnnnnnnnnnnnnnnnnnnnnnnnnnnnnnnnnnnnnnnnnnnnnnnnnnnnnnnnnnnnnnnnnnnnnnnnnnnnnnnnnnnnnnnnnnnnnnnnnnnnnnnnnnnnnnnnnnnnnnnnnnnnnnnnnnnnnnnnnnnnnnnnnnnnnnnnnnnnnnnnnnnnnnnnnnnnnnnnnnnnnnnnnnnnnnnnnnnnnnnnnnnnnnnnnnnnnnnnnnnnnnnnnnnnnnnnnnnnnnnnnnnnnnnnnnnnnnnnnnnnnnnnnnnnnnnnnnnnnnnnnnnnnnnnnnnnnnnnnnnnnnnnnnnnnnnnnnnnnnnnnnnnnnnnnnnnnnnnnnnnnnnnnnnnnnnnnnnnnnnnnnnnnnnnnnnnnnnnnnnnnnnnnnnnnnnnnnnnnnnnnnnnnnnnnnnnnnnnnnnnnnnnnnnnnnnnnnnnnnnnnnnnnnnnnnnnnnnnnnnnnnnnnnnnnnnnnnnnnnnnnnnnnnnnnnnnnnnnnnnnnnnnnnnnnnnnnnnnnnnnnnnnnnnnnnnnnnnnnnnnnnnnnnnnnnnnnnnnnnnnnnnnnnnnnnnnnnnnnnnnnnnnnnnnnnnnnnnnnnnnnnnnnnnnnnnnnnnnnnnnnnnnnnnnnnnnnnnnnnnnnnnnnnnnnnnnnnnnnnnnnnnnnnnnnnnnnnnnnnnnnnnnnnnnnnnnnnnnnnnnnnnnnnnnnnnnnnnnnnnnnnnnnnnnnnnnnnnnnnnnnnnnnnnnnnnnnnnnnnnnnnnnnnnnnnnnnnnnnnnnnnnnnnnnnnnnnnnnnnnnnnnnnnnnnnnnnnnnnnnnnnnnnnnnnnnnnnnnnnnnnnnnnnnnnnnnnnnnnnnnnnnnnnnnnnnnnnnnnnnnnnnnnnnnnnnnnnnnnnnnnnnnnnnnnnnnnnnnnnnnnnnnnnnnnnnnnnnnnnnnnnnnnnnnnnnnnnnnnnnnnnnnnnnnnnnnnnnnnnnnnnnnnnnnnnnnnnnnnnnnnnnnnnnnnnnnnnnnnnnnnnnnnnnnnnnnnnnnnnnnnnnnnnnnnnnnnnnnnnnnnnnnnnnnnnnnnnnnnnnnnnnnnnnnnnnnnnnnnnnnnnnnnnnnnnnnnnnnnnnnnnnnnnnnnnnnnnnnnnnnnnnnnnnnnnnnnnnnnnnnnnnnnnnnnnnnnnnnnnnnnnnnnnnnnnnnnnnnnnnnnnnnnnnnnnnnnnnnnnnnnnnnnnnnnnnnnnnnnnnnnnnnnnnnnnnnnnnnnnnnnnnnnnnnnnnnnnnnnnnnnnnnnnnnnnnnnnnnnnnnnnnnnnnnnnnnnnnnnnnnnnnnnnnnnnnnnnnnnnnnnnnnnnnnnnnnnnnnnnnnnnnnnnnnnnnnnnnnnnnnnnnnnnnnnnnnnnnnnnnnnnnnnnnnnnnnnnnnnnnnnnnnnnnnnnnnnnnnnnnnnnnnnnnnnnnnnnnnnnnnnnnnnnnnnnnnnnnnnnnnnnnnnnnnnnnnnnnnnnnnnnnnnnnnnnnnnnnnnnnnnnnnnnnnnnnnnnnnnnnnnnnnnnnnnnnnnnnnnnnnnnnnnnnnnnnnnnnnnnnnnnnnnnnnnnnnnnnnnnnnnnnnnnnnnnnnnnnnnnnnnnnnnnnnnnnnnnnnnnnnnnnnnnnnnnnnnnnnnnnnnnnnnnnnnnnnnnnnnnnnnnnnnnnnnnnnnnnnnnnnnnnnnnnnnnnnnnnnnnnnnnnnnnnnnnnnnnnnnnnnnnnnnnnnnnnnnnnnnnnnnnnnnnnnnnnnnnnnnnnnnnnnnnnnnnnnnnnnnnnnnnnnnnnnnnnnnnnnnnnnnnnnnnnnnnnnnnnnnnnnnnnnnnnnnnnnnnnnnnnnnnnnnnnnnnnnnnnnnnnnnnnnnnnnnnnnnnnnnnnnnnnnnnnnnnnnnnnnnnnnnnnnnnnnnnnnnnnnnnnnnnnnnnnnnnnnnnnnnnnnnnnnnnnnnnnnnnnnnnnnnnnnnnnnnnnnnnnnnnnnnnnnnnnnnnnnnnnnnnnnnnnnnnnnnnnnnnnnnnnnnnnnnnnnnnnnnnnnnnnnnnnnnnnnnnnnnnnnnnnnnnnnnnnnnnnnnnnnnnnnnnnnnnnnnnnnnnnnnnnnnnnnnnnnnnnnnnnnnnnnnnnnnnnnnnnnnnnnnnnnnnnnnnnnnnnnnnnnnnnnnnnnnnnnnnnnnnnnnnnnnnnnnnnnnnnnnnnnnnnnnnnnnnnnnnnnnnnnnnnnnnnnnnnnnnnnnnnnnnnnnnnnnnnnnnnnnnnnnnnnnnnnnnnnnnnnnnnnnnnnnnnnnnnnnnnnnnnnnnnnnnnnnnnnnnnnnnnnnnnnnnnnnnnnnnnnnnnnnnnnnnnnnnnnnnnnnnnnnnnnnnnnnnnnnnnnnnnnnnnnnnnnnnnnnnnnnnnnnnnnnnnnnnnnnnnnnnnnnnnnnnnnnnnnnnnnnnnnnnnnnnnnnnnnnnnnnnnnnnnnnnnnnnnnnnnnnnnnnnnnnnnnnnnnnnnnnnnnnnnnnnnnnnnnnnnnnnnnnnnnnnnnnnnnnnnnnnnnnnnnnnnnnnnnnnnnnnnnnnnnnnnnnnnnnnnnnnnnnnnnnnnnnnnnnnnnnnnnnnnnnnnnnnnnnnnnnnnnnnnnnnnnnnnnnnnnnnnnnnnnnnnnnnnnnnnnnnnnnnnnnnnnnnnnnnnnnnnnnnnnnnnnnnnnnnnnnnnnnnnnnnnnnnnnnnnnnnnnnnnnnnnnnnnnnnnnnnnnnnnnnnnnnnnnnnnnnnnnnnnnnnnnnnnnnnnnnnnnnnnnnnnnnnnnnnnnnnnnnnnnnnnnnnnnnnnnnnnnnnnnnnnnnnnnnnnnnnnnnnnnnnnnnnnnnnnnnnnnnnnnnnnnnnnnnnnnnnnnnnnnnnnnnnnnnnnnnnnnnnnnnnnnnnnnnnnnnnnnnnnnnnnnnnnnnnnnnnnnnnnnnnnnnnnnnnnnnnnnnnnnnnnnnnnnnnnnnnnnnnnnnnnnnnnnnnnnnnnnnnnnnnnnnnnnnnnnnnnnnnnnnnnnnnnnnnnnnnnnnnnnnnnnnnnnnnnnnnnnnnnnnnnnnnnnnnnnnnnnnnnnnnnnnnnnnnnnnnnnnnnnnnnnnnnnnnnnnnnnnnnnnnnnnnnnnnnnnnnnnnnnnnnnnnnnnnnnnnnnnnnnnnnnnnnnnnnnnnnnnnnnnnnnnnnnnnnnnnnnnnnnnnnnnnnnnnnnnnnnnnnnnnnnnnnnnnnnnnnnnnnnnnnnnnnnnnnnnnnnnnnnnnnnnnnnnnnnnnnnnnnnnnnnnnnnnnnnnnnnnnnnnnnnnnnnnnnnnnnnnnnnnnnnnnnnnnnnnnnnnnnnnnnnnnnnnnnnnnnnnnnnnnnnnnnnnnnnnnnnnnnnnnnnnnnnnnnnnnnnnnnnnnnnnnnnnnnnnnnnnnnnnnnnnnnnnnnnnnnnnnnnnnnnnnnnnnnnnnnnnnnnnnnnnnnnnnnnnnnnnnnnnnnnnnnnnnnnnnnnnnnnnnnnnnnnnnnnnnnnnnnnnnnnnnnnnnnnnnnnnnnnnnnnnnnnnnnnnnnnnnnnnnnnnnnnnnnnnnnnnnnnnnnnnnnnnnnnnnnnnnnnnnnnnnnnnnnnnnnnnnnnnnnnnnnnnnnnnnnnnnnnnnnnnnnnnnnnnnnnnnnnnnnnnnnnnnnnnnnnnnnnnnnnnnnnnnnnnnnnnnnnnnnnnnnnnnnnnnnnnnnnnnnnnnnnnnnnnnnnnnnnnnnnnnnnnnnnnnnnnnnnnnnnnnnnnnnnnnnnnnnnnnnnnnnnnnnnnnnnnnnnnnnnnnnnnnnnnnnnnnnnnnnnnnnnnnnnnnnnnnnnnnnnnnnnnnnnnnnnnnnnnnnnnnnnnnnnnnnnnnnnnnnnnnnnnnnnnnnnnnnnnnnnnnnnnnnnnnnnnnnnnnnnnnnnnnnnnnnnnnnnnnnnnnnnnnnnnnnnnnnnnnnnnnnnnnnnnnnnnnnnnnnnnnnnnnnnnnnnnnnnnnnnnnnnnnnnnnnnnnnnnnnnnnnnnnnnnnnnnnnnnnnnnnnnnnnnnnnnnnnnnnnnnnnnnnnnnnnnnnnnnnnnnnnnnnnnnnnnnnnnnnnnnnnnnnnnnnnnnnnnnnnnnnnnnnnnnnnnnnnnnnnnnnnnnnnnnnnnnnnnnnnnnnnnnnnnnnnnnnnnnnnnnnnnnnnnnnnnnnnnnnnnnnnnnnnnnnnnnnnnnnnnnnnnnnnnnnnnnnnnnnnnnnnnnnnnnnnnnnnnnnnnnnnnnnnnnnnnnnnnnnnnnnnnnnnnnnnnnnnnnnnnnnnnnnnnnnnnnnnnnnnnnnnnnnnnnnnnnnnnnnnnnnnnnnnnnnnnnnnnnnnnnnnnnnnnnnnnnnnnnnnnnnnnnnnnnnnnnnnnnnnnnnnnnnnnnnnnnnnnnnnnnnnnnnnnnnnnnnnnnnnnnnnnnnnnnnnnnnnnnnnnnnnnnnnnnnnnnnnnnnnnnnnnnnnnnnnnnnnnnnnnnnnnnnnnnnnnnnnnnnnnnnnnnnnnnnnnnnnnnnnnnnnnnnnnnnnnnnnnnnnnnnnnnnnnnnnnnnnnnnnnnnnnnnnnnnnnnnnnnnnnnnnnnnnnnnnnnnnnnnnnnnnnnnnnnnnnnnnnnnnnnnnnnnnnnnnnnnnnnnnnnnnnnnnnnnnnnnnnnnnnnnnnnnnnnnnnnnnnnnnnnnnnnnnnnnnnnnnnnnnnnnnnnnnnnnnnnnnnnnnnnnnnnnnnnnnnnnnnnnnnnnnnnnnnnnnnnnnnnnnnnnnnnnnnnnnnnnnnnnnnnnnnnnnnnnnnnnnnnnnnnnnnnnnnnnnnnnnnnnnnnnnnnnnnnnnnnnnnnnnnnnnnnnnnnnnnnnnnnnnnnnnnnnnnnnnnnnnnnnnnnnnnnnnnnnnnnnnnnnnnnnnnnnnnnnnnnnnnnnnnnnnnnnnnnnnnnnnnnnnnnnnnnnnnnnnnnnnnnnnnnnnnnnnnnnnnnnnnnnnnnnnnnnnnnnnnnnnnnnnnnnnnnnnnnnnnnnnnnnnnnnnnnnnnnnnnnnnnnnnnnnnnnnnnnnnnnnnnnnnnnnnnnnnnnnnnnnnnnnnnnnnnnnnnnnnnnnnnnnnnnnnnnnnnnnnnnnnnnnnnnnnnnnnnnnnnnnnnnnnnnnnnnnnnnnnnnnnnnnnnnnnnnnnnnnnnnnnnnnnnnnnnnnnnnnnnnnnnnnnnnnnnnnnnnnnnnnnnnnnnnnnnnnnnnnnnnnnnnnnnnnnnnnnnnnnnnnnnnnnnnnnnnnnnnnnnnnnnnnnnnnnnnnnnnnnnnnnnnnnnnnnnnnnnnnnnnnnnnnnnnnnnnnnnnnnnnnnnnnnnnnnnnnnnnnnnnnnnnnnnnnnnnnnnnnnnnnnnnnnnnnnnnnnnnnnnnnnnnnnnnnnnnnnnnnnnnnnnnnnnnnnnnnnnnnnnnnnnnnnnnnnnnnnnnnnnnnnnnnnnnnnnnnnnnnnnnnnnnnnnnnnnnnnnnnnnnnnnnnnnnnnnnnnnnnnnnnnnnnnnnnnnnnnnnnnnnnnnnnnnnnnnnnnnnnnnnnnnnnnnnnnnnnnnnnnnnnnnnnnnnnnnnnnnnnnnnnnnnnnnnnnnnnnnnnnnnnnnnnnnnnnnnnnnnnnnnnnnnnnnnnnnnnnnnnnnnnnnnnnnnnnnnnnnnnnnnnnnnnnnnnnnnnnnnnnnnnnnnnnnnnnnnnnnnnnnnnnnnnnnnnnnnnnnnnnnnnnnnnnnnnnnnnnnnnnnnnnnnnnnnnnnnnnnnnnnnnnnnnnnnnnnnnnnnnnnnnnnnnnnnnnnnnnnnnnnnnnnnnnnnnnnnnnnnnnnnnnnnnnnnnnnnnnnnnnnnnnnnnnnnnnnnnnnnnnnnnnnnnnnnnnnnnnnnnnnnnnnnnnnnnnnnnnnnnnnnnnnnnnnnnnnnnnnnnnnnnnnnnnnnnnnnnnnnnnnnnnnnnnnnnnnnnnnnnnnnnnnnnnnnnnnnnnnnnnnnnnnnnnnnnnnnnnnnnnnnnnnnnnnnnnnnnnnnnnnnnnnnnnnnnnnnnnnnnnnnnnnnnnnnnnnnnnnnnnnnnnnnnnnnnnnnnnnnnnnnnnnnnnnnnnnnnnnnnnnnnnnnnnnnnnnnnnnnnnnnnnnnnnnnnnnnnnnnnnnnnnnnnnnnnnnnnnnnnnnnnnnnnnnnnnnnnnnnnnnnnnnnnnnnnnnnnnnnnnnnnnnnnnnnnnnnnnnnnnnnnnnnnnnnnnnnnnnnnnnnnnnnnnnnnnnnnnnnnnnnnnnnnnnnnnnnnnnnnnnnnnnnnnnnnnnnnnnnnnnnnnnnnnnnnnnnnnnnnnnnnnnnnnnnnnnnnnnnnnnnnnnnnnnnnnnnnnnnnnnnnnnnnnnnnnnnnnnnnnnnnnnnnnnnnnnnnnnnnnnnnnnnnnnnnnnnnnnnnnnnnnnnnnnnnnnnnnnnnnnnnnnnnnnnnnnnnnnnnnnnnnnnnnnnnnnnnnnnnnnnnnnnnnnnnnnnnnnnnnnnnnnnnnnnnnnnnnnnnnnnnnnnnnnnnnnnnnnnnnnnnnnnnnnnnnnnnnnnnnnnnnnnnnnnnnnnnnnnnnnnnnnnnnnnnnnnnnnnnnnnnnnnnnnnnnnnnnnnnnnnnnnnnnnnnnnnnnnnnnnnnnnnnnnnnnnnnnnnnnnnnnnnnnnnnnnnnnnnnnnnnnnnnnnnnnnnnnnnnnnnnnnnnnnnnnnnnnnnnnnnnnnnnnnnnnnnnnnnnnnnnnnnnnnnnnnnnnnnnnnnnnnnnnnnnnnnnnnnnnnnnnnnnnnnnnnnnnnnnnnnnnnnnnnnnnnnnnnnnnnnnnnnnnnnnnnnnnnnnnnnnnnnnnnnnnnnnnnnnnnnnnnnnnnnnnnnnnnnnnnnnnnnnnnnnnnnnnnnnnnnnnnnnnnnnnnnnnnnnnnnnnnnnnnnnnnnnnnnnnnnnnnnnnnnnnnnnnnnnnnnnnnnnnnnnnnnnnnnnnnnnnnnnnnnnnnnnnnnnnnnnnnnnnnnnnnnnnnnnnnnnnnnnnnnnnnnnnnnnnnnnnnnnnnnnnnnnnnnnnnnnnnnnnnnnnnnnnnnnnnnnnnnnnnnnnnnnnnnnnnnnnnnnnnnnnnnnnnnnnnnnnnnnnnnnnnnnnnnnnnnnnnnnnnnnnnnnnnnnnnnnnnnnnnnnnnnnnnnnnnnnnnnnnnnnnnnnnnnnnnnnnnnnnnnnnnnnnnnnnnnnnnnnnnnnnnnnnnnnnnnnnnnnnnnnnnnnnnnnnnnnnnnnnnnnnnnnnnnnnnnnnnnnnnnnnnnnnnnnnnnnnnnnnnnnnnnnnnnnnnnnnnnnnnnnnnnnnnnnnnnnnnnnnnnnnnnnnnnnnnnnnnnnnnnnnnnnnnnnnnnnnnnnnnnnnnnnnnnnnnnnnnnnnnnnnnnnnnnnnnnnnnnnnnnnnnnnnnnnnnnnnnnnnnnnnnnnnnnnnnnnnnnnnnnnnnnnnnnnnnnnnnnnnnnnnnnnnnnnnnnnnnnnnnnnnnnnnnnnnnnnnnnnnnnnnnnnnnnnnnnnnnnnnnnnnnnnnnnnnnnnnnnnnnnnnnnnnnnnnnnnnnnnnnnnnnnnnnnnnnnnnnnnnnnnnnnnnnnnnnnnnnnnnnnnnnnnnnnnnnnnnnnnnnnnnnnnnnnnnnnnnnnnnnnnnnnnnnnnnnnnnnnnnnnnnnnnnnnnnnnnnnnnnnnnnnnnnnnnnnnnnnnnnnnnnnnnnnnnnnnnnnnnnnnnnnnnnnnnnnnnnnnnnnnnnnnnnnnnnnnnnnnnnnnnnnnnnnnnnnnnnnnnnnnnnnnnnnnnnnnnnnnnnnnnnnnnnnnnnnnnnnnnnnnnnnnnnnnnnnnnnnnnnnnnnnnnnnnnnnnnnnnnnnnnnnnnnnnnnnnnnnnnnnnnnnnnnnnnnnnnnnnnnnnnnnnnnnnnnnnnnnnnnnnnnnnnnnnnnnnnnnnnnnnnnnnnnnnnnnnnnnnnnnnnnnnnnnnnnnnnnnnnnnnnnnnnnnnnnnnnnnnnnnnnnnnnnnnnnnnnnnnnnnnnnnnnnnnnnnnnnnnnnnnnnnnnnnnnnnnnnnnnnnnnnnnnnnnnnnnnnnnnnnnnnnnnnnnnnnnnnnnnnnnnnnnnnnnnnnnnnnnnnnnnnnnnnnnnnnnnnnnnnnnnnnnnnnnnnnnnnnnnnnnnnnnnnnnnnnnnnnnnnnnnnnnnnnnnnnnnnnnnnnnnnnnnnnnnnnnnnnnnnnnnnnnnnnnnnnnnnnnnnnnnnnnnnnnnnnnnnnnnnnnnnnnnnnnnnnnnnnnnnnnnnnnnnnnnnnnnnnnnnnnnnnnnnnnnnnnnnnnnnnnnnnnnnnnnnnnnnnnnnnnnnnnnnnnnnnnnnnnnnnnnnnnnnnnnnnnnnnnnnnnnnnnnnnnnnnnnnnnnnnnnnnnnnnnnnnnnnnnnnnnnnnnnnnnnnnnnnnnnnnnnnnnnnnnnnnnnnnnnnnnnnnnnnnnnnnnnnnnnnnnnnnnnnnnnnnnnnnnnnnnnnnnnnnnnnnnnnnnnnnnnnnnnnnnnnnnnnnnnnnnnnnnnnnnnnnnnnnnnnnnnnnnnnnnnnnnnnnnnnnnnnnnnnnnnnnnnnnnnnnnnnnnnnnnnnnnnnnnnnnnnnnnnnnnnnnnnnnnnnnnnnnnnnnnnnnnnnnnnnnnnnnnnnnnnnnnnnnnnnnnnnnnnnnnnnnnnnnnnnnnnnnnnnnnnnnnnnnnnnnnnnnnnnnnnnnnnnnnnnnnnnnnnnnnnnnnnnnnnnnnnnnnnnnnnnnnnnnnnnnnnnnnnnnnnnnnnnnnnnnnnnnnnnnnnnnnnnnnnnnnnnnnnnnnnnnnnnnnnnnnnnnnnnnnnnnnnnnnnnnnnnnnnnnnnnnnnnnnnnnnnnnnnnnnnnnnnnnnnnnnnnnnnnnnnnnnnnnnnnnnnnnnnnnnnnnnnnnnnnnnnnnnnnnnnnnnnnnnnnnnnnnnnnnnnnnnnnnnnnnnnnnnnnnnnnnnnnnnnnnnnnnnnnnnnnnnnnnnnnnnnnnnnnnnnnnnnnnnnnnnnnnnnnnnnnnnnnnnnnnnnnnnnnnnnnnnnnnnnnnnnnnnnnnnnnnnnnnnnnnnnnnnnnnnnnnnnnnnnnnnnnnnnnnnnnnnnnnnnnnnnnnnnnnnnnnnnnnnnnnnnnnnnnnnnnnnnnnnnnnnnnnnnnnnnnnnnnnnnnnnnnnnnnnnnnnnnnnnnnnnnnnnnnnnnnnnnnnnnnnnnnnnnnnnnnnnnnnnnnnnnnnnnnnnnnnnnnnnnnnnnnnnnnnnnnnnnnnnnnnnnnnnnnnnnnnnnnnnnnnnnnnnnnnnnnnnnnnnnnnnnnnnnnnnnnnnnnnnnnnnnnnnnnnnnnnnnnnnnnnnnnnnnnnnnnnnnnnnnnnnnnnnnnnnnnnnnnnnnnnnnnnnnnnnnnnnnnnnnnnnnnnnnnnnnnnnnnnnnnnnnnnnnnnnnnnnnnnnnnnnnnnnnnnnnnnnnnnnnnnnnnnnnnnnnnnnnnnnnnnnnnnnnnnnnnnnnnnnnnnnnnnnnnnnnnnnnnnnnnnnnnnnnnnnnnnnnnnnnnnnnnnnnnnnnnnnnnnnnnnnnnnnnnnnnnnnnnnnnnnnnnnnnnnnnnnnnnnnnnnnnnnnnnnnnnnnnnnnnnnnnnnnnnnnnnnnnnnnnnnnnnnnnnnnnnnnnnnnnnnnnnnnnnnnnnnnnnnnnnnnnnnnnnnnnnnnnnnnnnnnnnnnnnnnnnnnnnnnnnnnnnnnnnnnnnnnnnnnnnnnnnnnnnnnnnnnnnnnnnnnnnnnnnnnnnnnnnnnnnnnnnnnnnnnnnnnnnnnnnnnnnnnnnnnnnnnnnnnnnnnnnnnnnnnnnnnnnnnnnnnnnnnnnnnnnnnnnnnnnnnnnnnnnnnnnnnnnnnnnnnnnnnnnnnnnnnnnnnnnnnnnnnnnnnnnnnnnnnnnnnnnnnnnnnnnnnnnnnnnnnnnnnnnnnnnnnnnnnnnnnnnnnnnnnnnnnnnnnnnnnnnnnnnnnnnnnnnnnnnnnnnnnnnnnnnnnnnnnnnnnnnnnnnnnnnnnnnnnnnnnnnnnnnnnnnnnnnnnnnnnnnnnnnnnnnnnnnnnnnnnnnnnnnnnnnnnnnnnnnnnnnnnnnnnnnnnnnnnnnnnnnnnnnnnnnnnnnnnnnnnnnnnnnnnnnnnnnnnnnnnnnnnnnnnnnnnnnnnnnnnnnnnnnnnnnnnnnnnnnnnnnnnnnnnnnnnnnnnnnnnnnnnnnnnnnnnnnnnnnnnnnnnnnnnnnnnnnnnnnnnnnnnnnnnnnnnnnnnnnnnnnnnnnnnnnnnnnnnnnnnnnnnnnnnnnnnnnnnnnnnnnnnnnnnnnnnnnnnnnnnnnnnnnnnnnnnnnnnnnnnnnnnnnnnnnnnnnnnnnnnnnnnnnnnnnnnnnnnnnnnnnnnnnnnnnnnnnnnnnnnnnnnnnnnnnnnnnnnnnnnnnnnnnnnnnnnnnnnnnnnnnnnnnnnnnnnnnnnnnnnnnnnnnnnnnnnnnnnnnnnnnnnnnnnnnnnnnnnnnnnnnnnnnnnnnnnnnnnnnnnnnnnnnnnnnnnnnnnnnnnnnnnnnnnnnnnnnnnnnnnnnnnnnnnnnnnnnnnnnnnnnnnnnnnnnnnnnnnnnnnnnnnnnnnnnnnnnnnnnnnnnnnnnnnnnnnnnnnnnnnnnnnnnnnnnnnnnnnnnnnnnnnnnnnnnnnnnnnnnnnnnnnnnnnnnnnnnnnnnnnnnnnnnnnnnnnnnnnnnnnnnnnnnnnnnnnnnnnnnnnnnnnnnnnnnnnnnnnnnnnnnnnnnnnnnnnnnnnnnnnnnnnnnnnnnnnnnnnnnnnnnnnnnnnnnnnnnnnnnnnnnnnnnnnnnnnnnnnnnnnnnnnnnnnnnnnnnnnnnnnnnnnnnnnnnnnnnnnnnnnnnnnnnnnnnnnnnnnnnnnnnnnnnnnnnnnnnnnnnnnnnnnnnnnnnnnnnnnnnnnnnnnnnnnnnnnnnnnnnnnnnnnnnnnnnnnnnnnnnnnnnnnnnnnnnnnnnnnnnnnnnnnnnnnnnnnnnnnnnnnnnnnnnnnnnnnnnnnnnnnnnnnnnnnnnnnnnnnnnnnnnnnnnnnnnnnnnnnnnnnnnnnnnnnnnnnnnnnnnnnnnnnnnnnnnnnnnnnnnnnnnnnnnnnnnnnnnnnnnnnnnnnnnnnnnnnnnnnnnnnnnnnnnnnnnnnnnnnnnnnnnnnnnnnnnnnnnnnnnnnnnnnnnnnnnnnnnnnnnnnnnnnnnnnnnnnnnnnnnnnnnnnnnnnnnnnnnnnnnnnnnnnnnnnnnnnnnnnnnnnnnnnnnnnnnnnnnnnnnnnnnnnnnnnnnnnnnnnnnnnnnnnnnnnnnnnnnnnnnnnnnnnnnnnnnnnnnnnnnnnnnnnnnnnnnnnnnnnnnnnnnnnnnnnnnnnnnnnnnnnnnnnnnnnnnnnnnnnnnnnnnnnnnnnnnnnnnnnnnnnnnnnnnnnnnnnnnnnnnnnnnnnnnnnnnnnnnnnnnnnnnnnnnnnnnnnnnnnnnnnnnnnnnnnnnnnnnnnnnnnnnnnnnnnnnnnnnnnnnnnnnnnnnnnnnnnnnnnnnnnnnnnnnnnnnnnnnnnnnnnnnnnnnnnnnnnnnnnnnnnnnnnnnnnnnnnnnnnnnnnnnnnnnnnnnnnnnnnnnnnnnnnnnnnnnnnnnnnnnnnnnnnnnnnnnnnnnnnnnnnnnnnnnnnnnnnnnnnnnnnnnnnnnnnnnnnnnnnnnnnnnnnnnnnnnnnnnnnnnnnnnnnnnnnnnnnnnnnnnnnnnnnnnnnnnnnnnnnnnnnnnnnnnnnnnnnnnnnnnnnnnnnnnnnnnnnnnnnnnnnnnnnnnnnnnnnnnnnnnnnnnnnnnnnnnnnnnnnnnnnnnnnnnnnnnnnnnnnnnnnnnnnnnnnnnnnnnnnnnnnnnnnnnnnnnnnnnnnnnnnnnnnnnnnnnnnnnnnnnnnnnnnnnnnnnnnnnnnnnnnnnnnnnnnnnnnnnnnnnnnnnnnnnnnnnnnnnnnnnnnnnnnnnnnnnnnnnnnnnnnnnnnnnnnnnnnnnnnnnnnnnnnnnnnnnnnnnnnnnnnnnnnnnnnnnnnnnnnnnnnnnnnnnnnnnnnnnnnnnnnnnnnnnnnnnnnnnnnnnnnnnnnnnnnnnnnnnnnnnnnnnnnnnnnnnnnnnnnnnnnnnnnnnnnnnnnnnnnnnnnnnnnnnnnnnnnnnnnnnnnnnnnnnnnnnnnnnnnnnnnnnnnnnnnnnnnnnnnnnnnnnnnnnnnnnnnnnnnnnnnnnnnnnnnnnnnnnnnnnnnnnnnnnnnnnnnnnnnnnnnnnnnnnnnnnnnnnnnnnnnnnnnnnnnnnnnnnnnnnnnnnnnnnnnnnnnnnnnnnnnnnnnnnnnnnnnnnnnnnnnnnnnnnnnnnnnnnnnnnnnnnnnnnnnnnnnnnnnnnnnnnnnnnnnnnnnnnnnnnnnnnnnnnnnnnnnnnnnnnnnnnnnnnnnnnnnnnnnnnnnnnnnnnnnnnnnnnnnnnnnnnnnnnnnnnnnnnnnnnnnnnnnnnnnnnnnnnnnnnnnnnnnnnnnnnnnnnnnnnnnnnnnnnnnnnnnnnnnnnnnnnnnnnnnnnnnnnnnnnnnnnnnnnnnnnnnnnnnnnnnnnnnnnnnnnnnnnnnnnnnnnnnnnnnnnnnnnnnnnnnnnnnnnnnnnnnnnnnnnnnnnnnnnnnnnnnnnnnnnnnnnnnnnnnnnnnnnnnnnnnnnnnnnnnnnnnnnnnnnnnnnnnnnnnnnnnnnnnnnnnnnnnnnnnnnnnnnnnnnnnnnnnnnnnnnnnnnnnnnnnnnnnnnnnnnnnnnnnnnnnnnnnnnnnnnnnnnnnnnnnnnnnnnnnnnnnnnnnnnnnnnnnnnnnnnnnnnnnnnnnnnnnnnnnnnnnnnnnnnnnnnnnnnnnnnnnnnnnnnnnnnnnnnnnnnnnnnnnnnnnnnnnnnnnnnnnnnnnnnnnnnnnnnnnnnnnnnnnnnnnnnnnnnnnnnnnnnnnnnnnnnnnnnnnnnnnnnnnnnnnnnnnnnnnnnnnnnnnnnnnnnnnnnnnnnnnnnnnnnnnnnnnnnnnnnnnnnnnnnnnnnnnnnnnnnnnnnnnnnnnnnnnnnnnnnnnnnnnnnnnnnnnnnnnnnnnnnnnnnnnnnnnnnnnnnnnnnnnnnnnnnnnnnnnnnnnnnnnnnnnnnnnnnnnnnnnnnnnnnnnnnnnnnnnnnnnnnnnnnnnnnnnnnnnnnnnnnnnnnnnnnnnnnnnnnnnnnnnnnnnnnnnnnnnnnnnnnnnnnnnnnnnnnnnnnnnnnnnnnnnnnnnnnnnnnnnnnnnnnnnnnnnnnnnnnnnnnnnnnnnnnnnnnnnnnnnnnnnnnnnnnnnnnnnnnnnnnnnnnnnnnnnnnnnnnnnnnnnnnnnnnnnnnnnnnnnnnnnnnnnnnnnnnnnnnnnnnnnnnnnnnnnnnnnnnnnnnnnnnnnnnnnnnnnnnnnnnnnnnnnnnnnnnnnnnnnnnnnnnnnnnnnnnnnnnnnnnnnnnnnnnnnnnnnnnnnnnnnnnnnnnnnnnnnnnnnnnnnnnnnnnnnnnnnnnnnnnnnnnnnnnnnnnnnnnnnnnnnnnnnnnnnnnnnnnnnnnnnnnnnnnnnnnnnnnnnnnnnnnnnnnnnnnnnnnnnnnnnnnnnnnnnnnnnnnnnnnnnnnnnnnnnnnnnnnnnnnnnnnnnnnnnnnnnnnnnnnnnnnnnnnnnnnnnnnnnnnnnnnnnnnnnnnnnnnnnnnnnnnnnnnnnnnnnnnnnnnnnnnnnnnnnnnnnnnnnnnnnnnnnnnnnnnnnnnnnnnnnnnnnnnnnnnnnnnnnnnnnnnnnnnnnnnnnnnnnnnnnnnnnnnnnnnnnnnnnnnnnnnnnnnnnnnnnnnnnnnnnnnnnnnnnnnnnnnnnnnnnnnnnnnnnnnnnnnnnnnnnnnnnnnnnnnnnnnnnnnnnnnnnnnnnnnnnnnnnnnnnnnnnnnnnnnnnnnnnnnnnnnnnnnnnnnnnnnnnnnnnnnnnnnnnnnnnnnnnnnnnnnnnnnnnnnnnnnnnnnnnnnnnnnnnnnnnnnnnnnnnnnnnnnnnnnnnnnnnnnnnnnnnnnnnnnnnnnnnnnnnnnnnnnnnnnnnnnnnnnnnnnnnnnnnnnnnnnnnnnnnnnnnnnnnnnnnnnnnnnnnnnnnnnnnnnnnnnnnnnnnnnnnnnnnnnnnnnnnnnnnnnnnnnnnnnnnnnnnnnnnnnnnnnnnnnnnnnnnnnnnnnnnnnnnnnnnnnnnnnnnnnnnnnnnnnnnnnnnnnnnnnnnnnnnnnnnnnnnnnnnnnnnnnnnnnnnnnnnnnnnnnnnnnnnnnnnnnnnnnnnnnnnnnnnnnnnnnnnnnnnnnnnnnnnnnnnnnnnnnnnnnnnnnnnnnnnnnnnnnnnnnnnnnnnnnnnnnnnnnnnnnnnnnnnnnnnnnnnnnnnnnnnnnnnnnnnnnnnnnnnnnnnnnnnnnnnnnnnnnnnnnnnnnnnnnnnnnnnnnnnnnnnnnnnnnnnnnnnnnnnnnnnnnnnnnnnnnnnnnnnnnnnnnnnnnnnnnnnnnnnnnnnnnnnnnnnnnnnnnnnnnnnnnnnnnnnnnnnnnnnnnnnnnnnnnnnnnnnnnnnnnnnnnnnnnnnnnnnnnnnnnnnnnnnnnnnnnnnnnnnnnnnnnnnnnnnnnnnnnnnnnnnnnnnnnnnnnnnnnnnnnnnnnnnnnnnnnnnnnnnnnnnnnnnnnnnnnnnnnnnnnnnnnnnnnnnnnnnnnnnnnnnnnnnnnnnnnnnnnnnnnnnnnnnnnnnnnnnnnnnnnnnnnnnnnnnnnnnnnnnnnnnnnnnnnnnnnnnnnnnnnnnnnnnnnnnnnnnnnnnnnnnnnnnnnnnnnnnnnnnnnnnnnnnnnnnnnnnnnnnnnnnnnnnnnnnnnnnnnnnnnnnnnnnnnnnnnnnnnnnnnnnnnnnnnnnnnnnnnnnnnnnnnnnnnnnnnnnnnnnnnnnnnnnnnnnnnnnnnnnnnnnnnnnnnnnnnnnnnnnnnnnnnnnnnnnnnnnnnnnnnnnnnnnnnnnnnnnnnnnnnnnnnnnnnnnnnnnnnnnnnnnnnnnnnnnnnnnnnnnnnnnnnnnnnnnnnnnnnnnnnnnnnnnnnnnnnnnnnnnnnnnnnnnnnnnnnnnnnnnnnnnnnnnnnnnnnnnnnnnnnnnnnnnnnnnnnnnnnnnnnnnnnnnnnnnnnnnnnnnnnnnnnnnnnnnnnnnnnnnnnnnnnnnnnnnnnnnnnnnnnnnnnnnnnnnnnnnnnnnnnnnnnnnnnnnnnnnnnnnnnnnnnnnnnnnnnnnnnnnnnnnnnnnnnnnnnnnnnnnnnnnnnnnnnnnnnnnnnnnnnnnnnnnnnnnnnnnnnnnnnnnnnnnnnnnnnnnnnnnnnnnnnnnnnnnnnnnnnnnnnnnnnnnnnnnnnnnnnnnnnnnnnnnnnnnnnnnnnnnnnnnnnnnnnnnnnnnnnnnnnnnnnnnnnnnnnnnnnnnnnnnnnnnnnnnnnnnnnnnnnnnnnnnnnnnnnnnnnnnnnnnnnnnnnnnnnnnnnnnnnnnnnnnnnnnnnnnnnnnnnnnnnnnnnnnnnnnnnnnnnnnnnnnnnnnnnnnnnnnnnnnnnnnnnnnnnnnnnnnnnnnnnnnnnnnnnnnnnnnnnnnnnnnnnnnnnnnnnnnnnnnnnnnnnnnnnnnnnnnnnnnnnnnnnnnnnnnnnnnnnnnnnnnnnnnnnnnnnnnnnnnnnnnnnnnnnnnnnnnnnnnnnnnnnnnnnnnnnnnnnnnnnnnnnnnnnnnnnnnnnnnnnnnnnnnnnnnnnnnnnnnnnnnnnnnnnnnnnnnnnnnnnnnnnnnnnnnnnnnnnnnnnnnnnnnnnnnnnnnnnnnnnnnnnnnnnnnnnnnnnnnnnnnnnnnnnnnnnnnnnnnnnnnnnnnnnnnnnnnnnnnnnnnnnnnnnnnnnnnnnnnnnnnnnnnnnnnnnnnnnnnnnnnnnnnnnnnnnnnnnnnnnnnnnnnnnnnnnnnnnnnnnnnnnnnnnnnnnnnnnnnnnnnnnnnnnnnnnnnnnnnnnnnnnnnnnnnnnnnnnnnnnnnnnnnnnnnnnnnnnnnnnnnnnnnnnnnnnnnnnnnnnnnnnnnnnnnnnnnnnnnnnnnnnnnnnnnnnnnnnnnnnnnnnnnnnnnnnnnnnnnnnnnnnnnnnnnnnnnnnnnnnnnnnnnnnnnnnnnnnnnnnnnnnnnnnnnnnnnnnnnnnnnnnnnnnnnnnnnnnnnnnnnnnnnnnnnnnnnnnnnnnnnnnnnnnnnnnnnnnnnnnnnnnnnnnnnnnnnnnnnnnnnnnnnnnnnnnnnnnnnnnnnnnnnnnnnnnnnnnnnnnnnnnnnnnnnnnnnnnnnnnnnnnnnnnnnnnnnnnnnnnnnnnnnnnnnnnnnnnnnnnnnnnnnnnnnnnnnnnnnnnnnnnnnnnnnnnnnnnnnnnnnnnnnnnnnnnnnnnnnnnnnnnnnnnnnnnnnnnnnnnnnnnnnnnnnnnnnnnnnnnnnnnnnnnnnnnnnnnnnnnnnnnnnnnnnnnnnnnnnnnnnnnnnnnnnnnnnnnnnnnnnnnnnnnnnnnnnnnnnnnnnnnnnnnnnnnnnnnnnnnnnnnnnnnnnnnnnnnnnnnnnnnnnnnnnnnnnnnnnnnnnnnnnnnnnnnnnnnnnnnnnnnnnnnnnnnnnnnnnnnnnnnnnnnnnnnnnnnnnnnnnnnnnnnnnnnnnnnnnnnnnnnnnnnnnnnnnnnnnnnnnnnnnnnnnnnnnnnnnnnnnnnnnnnnnnnnnnnnnnnnnnnnnnnnnnnnnnnnnnnnnnnnnnnnnnnnnnnnnnnnnnnnnnnnnnnnnnnnnnnnnnnnnnnnnnnnnnnnnnnnnnnnnnnnnnnnnnnnnnnnnnnnnnnnnnnnnnnnnnnnnnnnnnnnnnnnnnnnnnnnnnnnnnnnnnnnnnnnnnnnnnnnnnnnnnnnnnnnnnnnnnnnnnnnnnnnnnnnnnnnnnnnnnnnnnnnnnnnnnnnnnnnnnnnnnnnnnnnnnnnnnnnnnnnnnnnnnnnnnnnnnnnnnnnnnnnnnnnnnnnnnnnnnnnnnnnnnnnnnnnnnnnnnnnnnnnnnnnnnnnnnnnnnnnnnnnnnnnnnnnnnnnnnnnnnnnnnnnnnnnnnnnnnnnnnnnnnnnnnnnnnnnnnnnnnnnnnnnnnnnnnnnnnnnnnnnnnnnnnnnnnnnnnnnnnnnnnnnnnnnnnnnnnnnnnnnnnnnnnnnnnnnnnnnnnnnnnnnnnnnnnnnnnnnnnnnnnnnnnnnnnnnnnnnnnnnnnnnnnnnnnnnnnnnnnnnnnnnnnnnnnnnnnnnnnnnnnnnnnnnnnnnnnnnnnnnnnnnnnnnnnnnnnnnnnnnnnnnnnnnnnnnnnnnnnnnnnnnnnnnnnnnnnnnnnnnnnnnnnnnnnnnnnnnnnnnnnnnnnnnnnnnnnnnnnnnnnnnnnnnnnnnnnnnnnnnnnnnnnnnnnnnnnnnnnnnnnnnnnnnnnnnnnnnnnnnnnnnnnnnnnnnnnnnnnnnnnnnnnnnnnnnnnnnnnnnnnnnnnnnnnnnnnnnnnnnnnnnnnnnnnnnnnnnnnnnnnnnnnnnnnnnnnnnnnnnnnnnnnnnnnnnnnnnnnnnnnnnnnnnnnnnnnnnnnnnnnnnnnnnnnnnnnnnnnnnnnnnnnnnnnnnnnnnnnnnnnnnnnnnnnnnnnnnnnnnnnnnnnnnnnnnnnnnnnnnnnnnnnnnnnnnnnnnnnnnnnnnnnnnnnnnnnnnnnnnnnnnnnnnnnnnnnnnnnnnnnnnnnnnnnnnnnnnnnnnnnnnnnnnnnnnnnnnnnnnnnnnnnnnnnnnnnnnnnnnnnnnnnnnnnnnnnnnnnnnnnnnnnnnnnnnnnnnnnnnnnnnnnnnnnnnnnnnnnnnnnnnnnnnnnnnnnnnnnnnnnnnnnnnnnnnnnnnnnnnnnnnnnnnnnnnnnnnnnnnnnnnnnnnnnnnnnnnnnnnnnnnnnnnnnnnnnnnnnnnnnnnnnnnnnnnnnnnnnnnnnnnnnnnnnnnnnnnnnnnnnnnnnnnnnnnnnnnnnnnnnnnnnnnnnnnnnnnnnnnnnnnnnnnnnnnnnnnnnnnnnnnnnnnnnnnnnnnnnnnnnnnnnnnnnnnnnnnnnnnnnnnnnnnnnnnnnnnnnnnnnnnnnnnnnnnnnnnnnnnnnnnnnnnnnnnnnnnnnnnnnnnnnnnnnnnnnnnnnnnnnnnnnnnnnnnnnnnnnnnnnnnnnnnnnnnnnnnnnnnnnnnnnnnnnnnnnnnnnnnnnnnnnnnnnnnnnnnnnnnnnnnnnnnnnnnnnnnnnnnnnnnnnnnnnnnnnnnnnnnnnnnnnnnnnnnnnnnnnnnnnnnnnnnnnnnnnnnnnnnnnnnnnnnnnnnnnnnnnnnnnnnnnnnnnnnnnnnnnnnnnnnnnnnnnnnnnnnnnnnnnnnnnnnnnnnnnnnnnnnnnnnnnnnnnnnnnnnnnnnnnnnnnnnnnnnnnnnnnnnnnnnnnnnnnnnnnnnnnnnnnnnnnnnnnnnnnnnnnnnnnnnnnnnnnnnnnnnnnnnnnnnnnnnnnnnnnnnnnnnnnnnnnnnnnnnnnnnnnnnnnnnnnnnnnnnnnnnnnnnnnnnnnnnnnnnnnnnnnnnnnnnnnnnnnnnnnnnnnnnnnnnnnnnnnnnnnnnnnnnnnnnnnnnnnnnnnnnnnnnnnnnnnnnnnnnnnnnnnnnnnnnnnnnnnnnnnnnnnnnnnnnnnnnnnnnnnnnnnnnnnnnnnnnnnnnnnnnnnnnnnnnnnnnnnnnnnnnnnnnnnnnnnnnnnnnnnnnnnnnnnnnnnnnnnnnnnnnnnnnnnnnnnnnnnnnnnnnnnnnnnnnnnnnnnnnnnnnnnnnnnnnnnnnnnnnnnnnnnnnnnnnnnnnnnnnnnnnnnnnnnnnnnnnnnnnnnnnnnnnnnnnnnnnnnnnnnnnnnnnnnnnnnnnnnnnnnnnnnnnnnnnnnnnnnnnnnnnnnnnnnnnnnnnnnnnnnnnnnnnnnnnnnnnnnnnnnnnnnnnnnnnnnnnnnnnnnnnnnnnnnnnnnnnnnnnnnnnnnnnnnnnnnnnnnnnnnnnnnnnnnnnnnnnnnnnnnnnnnnnnnnnnnnnnnnnnnnnnnnnnnnnnnnnnnnnnnnnnnnnnnnnnnnnnnnnnnnnnnnnnnnnnnnnnnnnnnnnnnnnnnnnnnnnnnnnnnnnnnnnnnnnnnnnnnnnnnnnnnnnnnnnnnnnnnnnnnnnnnnnnnnnnnnnnnnnnnnnnnnnnnnnnnnnnnnnnnnnnnnnnnnnnnnnnnnnnnnnnnnnnnnnnnnnnnnnnnnnnnnnnnnnnnnnnnnnnnnnnnnnnnnnnnnnnnnnnnnnnnnnnnnnnnnnnnnnnnnnnnnnnnnnnnnnnnnnnnnnnnnnnnnnnnnnnnnnnnnnnnnnnnnnnnnnnnnnnnnnnnnnnnnnnnnnnnnnnnnnnnnnnnnnnnnnnnnnnnnnnnnnnnnnnnnnnnnnnnnnnnnnnnnnnnnnnnnnnnnnnnnnnnnnnnnnnnnnnnnnnnnnnnnnnnnnnnnnnnnnnnnnnnnnnnnnnnnnnnnnnnnnnnnnnnnnnnnnnnnnnnnnnnnnnnnnnnnnnnnnnnnnnnnnnnnnnnnnnnnnnnnnnnnnnnnnnnnnnnnnnnnnnnnnnnnnnnnnnnnnnnnnnnnnnnnnnnnnnnnnnnnnnnnnnnnnnnnnnnnnnnnnnnnnnnnnnnnnnnnnnnnnnnnnnnnnnnnnnnnnnnnnnnnnnnnnnnnnnnnnnnnnnnnnnnnnnnnnnnnnnnnnnnnnnnnnnnnnnnnnnnnnnnnnnnnnnnnnnnnnnnnnnnnnnnnnnnnnnnnnnnnnnnnnnnnnnnnnnnnnnnnnnnnnnnnnnnnnnnnnnnnnnnnnnnnnnnnnnnnnnnnnnnnnnnnnnnnnnnnnnnnnnnnnnnnnnnnnnnnnnnnnnnnnnnnnnnnnnnnnnnnnnnnnnnnnnnnnnnnnnnnnnnnnnnnnnnnnnnnnnnnnnnnnnnnnnnnnnnnnnnnnnnnnnnnnnnnnnnnnnnnnnnnnnnnnnnnnnnnnnnnnnnnnnnnnnnnnnnnnnnnnnnnnnnnnnnnnnnnnnnnnnnnnnnnnnnnnnnnnnnnnnnnnnnnnnnnnnnnnnnnnnnnnnnnnnnnnnnnnnnnnnnnnnnnnnnnnnnnnnnnnnnnnnnnnnnnnnnnnnnnnnnnnnnnnnnnnnnnnnnnnnnnnnnnnnnnnnnnnnnnnnnnnnnnnnnnnnnnnnnnnnnnnnnnnnnnnnnnnnnnnnnnnnnnnnnnnnnnnnnnnnnnnnnnnnnnnnnnnnnnnnnnnnnnnnnnnnnnnnnnnnnnnnnnnnnnnnnnnnnnnnnnnnnnnnnnnnnnnnnnnnnnnnnnnnnnnnnnnnnnnnnnnnnnnnnnnnnnnnnnnnnnnnnnnnnnnnnnnnnnnnnnnnnnnnnnnnnnnnnnnnnnnnnnnnnnnnnnnnnnnnnnnnnnnnnnnnnnnnnnnnnnnnnnnnnnnnnnnnnnnnnnnnnnnnnnnnnnnnnnnnnnnnnnnnnnnnnnnnnnnnnnnnnnnnnnnnnnnnnnnnnnnnnnnnnnnnnnnnnnnnnnnnnnnnnnnnnnnnnnnnnnnnnnnnnnnnnnnnnnnnnnnnnnnnnnnnnnnnnnnnnnnnnnnnnnnnnnnnnnnnnnnnnnnnnnnnnnnnnnnnnnnnnnnnnnnnnnnnnnnnnnnnnnnnnnnnnnnnnnnnnnnnnnnnnnnnnnnnnnnnnnnnnnnnnnnnnnnnnnnnnnnnnnnnnnnnnnnnnnnnnnnnnnnnnnnnnnnnnnnnnnnnnnnnnnnnnnnnnnnnnnnnnnnnnnnnnnnnnnnnnnnnnnnnnnnnnnnnnnnnnnnnnnnnnnnnnnnnnnnnnnnnnnnnnnnnnnnnnnnnnnnnnnnnnnnnnnnnnnnnnnnnnnnnnnnnnnnnnnnnnnnnnnnnnnnnnnnnnnnnnnnnnnnnnnnnnnnnnnnnnnnnnnnnnnnnnnnnnnnnnnnnnnnnnnnnnnnnnnnnnnnnnnnnnnnnnnnnnnnnnnnnnnnnnnnnnnnnnnnnnnnnnnnnnnnnnnnnnnnnnnnnnnnnnnnnnnnnnnnnnnnnnnnnnnnnnnnnnnnnnnnnnnnnnnnnnnnnnnnnnnnnnnnnnnnnnnnnnnnnnnnnnnnnnnnnnnnnnnnnnnnnnnnnnnnnnnnnnnnnnnnnnnnnnnnnnnnnnnnnnnnnnnnnnnnnnnnnnnnnnnnnnnnnnnnnnnnnnnnnnnnnnnnnnnnnnnnnnnnnnnnnnnnnnnnnnnnnnnnnnnnnnnnnnnnnnnnnnnnnnnnnnnnnnnnnnnnnnnnnnnnnnnnnnnnnnnnnnnnnnnnnnnnnnnnnnnnnnnnnnnnnnnnnnnnnnnnnnnnnnnnnnnnnnnnnnnnnnnnnnnnnnnnnnnnnnnnnnnnnnnnnnnnnnnnnnnnnnnnnnnnnnnnnnnnnnnnnnnnnnnnnnnnnnnnnnnnnnnnnnnnnnnnnnnnnnnnnnnnnnnnnnnnnnnnnnnnnnnnnnnnnnnnnnnnnnnnnnnnnnnnnnnnnnnnnnnnnnnnnnnnnnnnnnnnnnnnnnnnnnnnnnnnnnnnnnnnnnnnnnnnnnnnnnnnnnnnnnnnnnnnnnnnnnnnnnnnnnnnnnnnnnnnnnnnnnnnnnnnnnnnnnnnnnnnnnnnnnnnnnnnnnnnnnnnnnnnnnnnnnnnnnnnnnnnnnnnnnnnnnnnnnnnnnnnnnnnnnnnnnnnnnnnnnnnnnnnnnnnnnnnnnnnnnnnnnnnnnnnnnnnnnnnnnnnnnnnnnnnnnnnnnnnnnnnnnnnnnnnnnnnnnnnnnnnnnnnnnnnnnnnnnnnnnnnnnnnnnnnnnnnnnnnnnnnnnnnnnnnnnnnnnnnnnnnnnnnnnnnnnnnnnnnnnnnnnnnnnnnnnnnnnnnnnnnnnnnnnnnnnnnnnnnnnnnnnnnnnnnnnnnnnnnnnnnnnnnnnnnnnnnnnnnnnnnnnnnnnnnnnnnnnnnnnnnnnnnnnnnnnnnnnnnnnnnnnnnnnnnnnnnnnnnnnnnnnnnnnnnnnnnnnnnnnnnnnnnnnnnnnnnnnnnnnnnnnnnnnnnnnnnnnnnnnnnnnnnnnnnnnnnnnnnnnnnnnnnnnnnnnnnnnnnnnnnnnnnnnnnnnnnnnnnnnnnnnnnnnnnnnnnnnnnnnnnnnnnnnnnnnnnnnnnnnnnnnnnnnnnnnnnnnnnnnnnnnnnnnnnnnnnnnnnnnnnnnnnnnnnnnnnnnnnnnnnnnnnnnnnnnnnnnnnnnnnnnnnnnnnnnnnnnnnnnnnnnnnnnnnnnnnnnnnnnnnnnnnnnnnnnnnnnnnnnnnnnnnnnnnnnnnnnnnnnnnnnnnnnnnnnnnnnnnnnnnnnnnnnnnnnnnnnnnnnnnnnnnnnnnnnnnnnnnnnnnnnnnnnnnnnnnnnnnnnnnnnnnnnnnnnnnnnnnnnnnnnnnnnnnnnnnnnnnnnnnnnnnnnnnnnnnnnnnnnnnnnnnnnnnnnnnnnnnnnnnnnnnnnnnnnnnnnnnnnnnnnnnnnnnnnnnnnnnnnnnnnnnnnnnnnnnnnnnnnnnnnnnnnnnnnnnnnnnnnnnnnnnnnnnnnnnnnnnnnnnnnnnnnnnnnnnnnnnnnnnnnnnnnnnnnnnnnnnnnnnnnnnnnnnnnnnnnnnnnnnnnnnnnnnnnnnnnnnnnnnnnnnnnnnnnnnnnnnnnnnnnnnnnnnnnnnnnnnnnnnnnnnnnnnnnnnnnnnnnnnnnnnnnnnnnnnnnnnnnnnnnnnnnnnnnnnnnnnnnnnnnnnnnnnnnnnnnnnnnnnnnnnnnnnnnnnnnnnnnnnnnnnnnnnnnnnnnnnnnnnnnnnnnnnnnnnnnnnnnnnnnnnnnnnnnnnnnnnnnnnnnnnnnnnnnnnnnnnnnnnnnnnnnnnnnnnnnnnnnnnnnnnnnnnnnnnnnnnnnnnnnnnnnnnnnnnnnnnnnnnnnnnnnnnnnnnnnnnnnnnnnnnnnnnnnnnnnnnnnnnnnnnnnnnnnnnnnnnnnnnnnnnnnnnnnnnnnnnnnnnnnnnnnnnnnnnnnnnnnnnnnnnnnnnnnnnnnnnnnnnnnnnnnnnnnnnnnnnnnnnnnnnnnnnnnnnnnnnnnnnnnnnnnnnnnnnnnnnnnnnnnnnnnnnnnnnnnnnnnnnnnnnnnnnnnnnnnnnnnnnnnnnnnnnnnnnnnnnnnnnnnnnnnnnnnnnnnnnnnnnnnnnnnnnnnnnnnnnnnnnnnnnnnnnnnnnnnnnnnnnnnnnnnnnnnnnnnnnnnnnnnnnnnnnnnnnnnnnnnnnnnnnnnnnnnnnnnnnnnnnnnnnnnnnnnnnnnnnnnnnnnnnnnnnnnnnnnnnnnnnnnnnnnnnnnnnnnnnnnnnnnnnnnnnnnnnnnnnnnnnnnnnnnnnnnnnnnnnnnnnnnnnnnnnnnnnnnnnnnnnnnnnnnnnnnnnnnnnnnnnnnnnnnnnnnnnnnnnnnnnnnnnnnnnnnnnnnnnnnnnnnnnnnnnnnnnnnnnnnnnnnnnnnnnnnnnnnnnnnnnnnnnnnnnnnnnnnnnnnnnnnnnnnnnnnnnnnnnnnnnnnnnnnnnnnnnnnnnnnnnnnnnnnnnnnnnnnnnnnnnnnnnnnnnnnnnnnnnnnnnnnnnnnnnnnnnnnnnnnnnnnnnnnnnnnnnnnnnnnnnnnnnnnnnnnnnnnnnnnnnnnnnnnnnnnnnnnnnnnnnnnnnnnnnnnnnnnnnnnnnnnnnnnnnnnnnnnnnnnnnnnnnnnnnnnnnnnnnnnnnnnnnnnnnnnnnnnnnnnnnnnnnnnnnnnnnnnnnnnnnnnnnnnnnnnnnnnnnnnnnnnnnnnnnnnnnnnnnnnnnnnnnnnnnnnnnnnnnnnnnnnnnnnnnnnnnnnnnnnnnnnnnnnnnnnnnnnnnnnnnnnnnnnnnnnnnnnnnnnnnnnnnnnnnnnnnnnnnnnnnnnnnnnnnnnnnnnnnnnnnnnnnnnnnnnnnnnnnnnnnnnnnnnnnnnnnnnnnnnnnnnnnnnnnnnnnnnnnnnnnnnnnnnnnnnnnnnnnnnnnnnnnnnnnnnnnnnnnnnnnnnnnnnnnnnnnnnnnnnnnnnnnnnnnnnnnnnnnnnnnnnnnnnnnnnnnnnnnnnnnnnnnnnnnnnnnnnnnnnnnnnnnnnnnnnnnnnnnnnnnnnnnnnnnnnnnnnnnnnnnnnnnnnnnnnnnnnnnnnnnnnnnnnnnnnnnnnnnnnnnnnnnnnnnnnnnnnnnnnnnnnnnnnnnnnnnnnnnnnnnnnnnnnnnnnnnnnnnnnnnnnnnnnnnnnnnnnnnnnnnnnnnnnnnnnnnnnnnnnnnnnnnnnnnnnnnnnnnnnnnnnnnnnnnnnnnnnnnnnnnnnnnnnnnnnnnnnnnnnnnnnnnnnnnnnnnnnnnnnnnnnnnnnnnnnnnnnnnnnnnnnnnnnnnnnnnnnnnnnnnnnnnnnnnnnnnnnnnnnnnnnnnnnnnnnnnnnnnnnnnnnnnnnnnnnnnnnnnnnnnnnnnnnnnnnnnnnnnnnnnnnnnnnnnnnnnnnnnnnnnnnnnnnnnnnnnnnnnnnnnnnnnnnnnnnnnnnnnnnnnnnnnnnnnnnnnnnnnnnnnnnnnnnnnnnnnnnnnnnnnnnnnnnnnnnnnnnnnnnnnnnnnnnnnnnnnnnnnnnnnnnnnnnnnnnnnnnnnnnnnnnnnnnnnnnnnnnnnnnnnnnnnnnnnnnnnnnnnnnnnnnnnnnnnnnnnnnnnnnnnnnnnnnnnnnnnnnnnnnnnnnnnnnnnnnnnnnnnnnnnnnnnnnnnnnnnnnnnnnnnnnnnnnnnnnnnnnnnnnnnnnnnnnnnnnnnnnnnnnnnnnnnnnnnnnnnnnnnnnnnnnnnnnnnnnnnnnnnnnnnnnnnnnnnnnnnnnnnnnnnnnnnnnnnnnnnnnnnnnnnnnnnnnnnnnnnnnnnnnnnnnnnnnnnnnnnnnnnnnnnnnnnnnnnnnnnnnnnnnnnnnnnnnnnnnnnnnnnnnnnnnnnnnnnnnnnnnnnnnnnnnnnnnnnnnnnnnnnnnnnnnnnnnnnnnnnnnnnnnnnnnnnnnnnnnnnnnnnnnnnnnnnnnnnnnnnnnnnnnnnnnnnnnnnnnnnnnnnnnnnnnnnnnnnnnnnnnnnnnnnnnnnnnnnnnnnnnnnnnnnnnnnnnnnnnnnnnnnnnnnnnnnnnnnnnnnnnnnnnnnnnnnnnnnnnnnnnnnnnnnnnnnnnnnnnnnnnnnnnnnnnnnnnnnnnnnnnnnnnnnnnnnnnnnnnnnnnnnnnnnnnnnnnnnnnnnnnnnnnnnnnnnnnnnnnnnnnnnnnnnnnnnnnnnnnnnnnnnnnnnnnnnnnnnnnnnnnnnnnnnnnnnnnnnnnnnnnnnnnnnnnnnnnnnnnnnnnnnnnnnnnnnnnnnnnnnnnnnnnnnnnnnnnnnnnnnnnnnnnnnnnnnnnnnnnnnnnnnnnnnnnnnnnnnnnnnnnnnnnnnnnnnnnnnnnnnnnnnnnnnnnnnnnnnnnnnnnnnnnnnnnnnnnnnnnnnnnnnnnnnnnnnnnnnnnnnnnnnnnnnnnnnnnnnnnnnnnnnnnnnnnnnnnnnnnnnnnnnnnnnnnnnnnnnnnnnnnnnnnnnnnnnnnnnnnnnnnnnnnnnnnnnnnnnnnnnnnnnnnnnnnnnnnnnnnnnnnnnnnnnnnnnnnnnnnnnnnnnnnnnnnnnnnnnnnnnnnnnnnnnnnnnnnnnnnnnnnnnnnnnnnnnnnnnnnnnnnnnnnnnnnnnnnnnnnnnnnnnnnnnnnnnnnnnnnnnnnnnnnnnnnnnnnnnnnnnnnnnnnnnnnnnnnnnnnnnnnnnnnnnnnnnnnnnnnnnnnnnnnnnnnnnnnnnnnnnnnnnnnnnnnnnnnnnnnnnnnnnnnnnnnnnnnnnnnnnnnnnnnnnnnnnnnnnnnnnnnnnnnnnnnnnnnnnnnnnnnnnnnnnnnnnnnnnnnnnnnnnnnnnnnnnnnnnnnnnnnnnnnnnnnnnnnnnnnnnnnnnnnnnnnnnnnnnnnnnnnnnnnnnnnnnnnnnnnnnnnnnnnnnnnnnnnnnnnnnnnnnnnnnnnnnnnnnnnnnnnnnnnnnnnnnnnnnnnnnnnnnnnnnnnnnnnnnnnnnnnnnnnnnnnnnnnnnnnnnnnnnnnnnnnnnnnnnnnnnnnnnnnnnnnnnnnnnnnnnnnnnnnnnnnnnnnnnnnnnnnnnnnnnnnnnnnnnnnnnnnnnnnnnnnnnnnnnnnnnnnnnnnnnnnnnnnnnnnnnnnnnnnnnnnnnnnnnnnnnnnnnnnnnnnnnnnnnnnnnnnnnnnnnnnnnnnnnnnnnnnnnnnnnnnnnnnnnnnnnnnnnnnnnnnnnnnnnnnnnnnnnnnnnnnnnnnnnnnnnnnnnnnnnnnnnnnnnnnnnnnnnnnnnnnnnnnnnnnnnnnnnnnnnnnnnnnnnnnnnnnnnnnnnnnnnnnnnnnnnnnnnnnnnnnnnnnnnnnnnnnnnnnnnnnnnnnnnnnnnnnnnnnnnnnnnnnnnnnnnnnnnnnnnnnnnnnnnnnnnnnnnnnnnnnnnnnnnnnnnnnnnnnnnnnnnnnnnnnnnnnnnnnnnnnnnnnnnnnnnnnnnnnnnnnnnnnnnnnnnnnnnnnnnnnnnnnnnnnnnnnnnnnnnnnnnnnnnnnnnnnnnnnnnnnnnnnnnnnnnnnnnnnnnnnnnnnnnnnnnnnnnnnnnnnnnnnnnnnnnnnnnnnnnnnnnnnnnnnnnnnnnnnnnnnnnnnnnnnnnnnnnnnnnnnnnnnnnnnnnnnnnnnnnnnnnnnnnnnnnnnnnnnnnnnnnnnnnnnnnnnnnnnnnnnnnnnnnnnnnnnnnnnnnnnnnnnnnnnnnnnnnnnnnnnnnnnnnnnnnnnnnnnnnnnnnnnnnnnnnnnnnnnnnnnnnnnnnnnnnnnnnnnnnnnnnnnnnnnnnnnnnnnnnnnnnnnnnnnnnnnnnnnnnnnnnnnnnnnnnnnnnnnnnnnnnnnnnnnnnnnnnnnnnnnnnnnnnnnnnnnnnnnnnnnnnnnnnnnnnnnnnnnnnnnnnnnnnnnnnnnnnnnnnnnnnnnnnnnnnnnnnnnnnnnnnnnnnnnnnnnnnnnnnnnnnnnnnnnnnnnnnnnnnnnnnnnnnnnnnnnnnnnnnnnnnnnnnnnnnnnnnnnnnnnnnnnnnnnnnnnnnnnnnnnnnnnnnnnnnnnnnnnnnnnnnnnnnnnnnnnnnnnnnnnnnnnnnnnnnnnnnnnnnnnnnnnnnnnnnnnnnnnnnnnnnnnnnnnnnnnnnnnnnnnnnnnnnnnnnnnnnnnnnnnnnnnnnnnnnnnnnnnnnnnnnnnnnnnnnnnnnnnnnnnnnnnnnnnnnnnnnnnnnnnnnnnnnnnnnnnnnnnnnnnnnnnnnnnnnnnnnnnnnnnnnnnnnnnnnnnnnnnnnnnnnnnnnnnnnnnnnnnnnnnnnnnnnnnnnnnnnnnnnnnnnnnnnnnnnnnnnnnnnnnnnnnnnnnnnnnnnnnnnnnnnnnnnnnnnnnnnnnnnnnnnnnnnnnnnnnnnnnnnnnnnnnnnnnnnnnnnnnnnnnnnnnnnnnnnnnnnnnnnnnnnnnnnnnnnnnnnnnnnnnnnnnnnnnnnnnnnnnnnnnnnnnnnnnnnnnnnnnnnnnnnnnnnnnnnnnnnnnnnnnnnnnnnnnnnnnnnnnnnnnnnnnnnnnnnnnnnnnnnnnnnnnnnnnnnnnnnnnnnnnnnnnnnnnnnnnnnnnnnnnnnnnnnnnnnnnnnnnnnnnnnnnnnnnnnnnnnnnnnnnnnnnnnnnnnnnnnnnnnnnnnnnnnnnnnnnnnnnnnnnnnnnnnnnnnnnnnnnnnnnnnnnnnnnnnnnnnnnnnnnnnnnnnnnnnnnnnnnnnnnnnnnnnnnnnnnnnnnnnnnnnnnnnnnnnnnnnnnnnnnnnnnnnnnnnnnnnnnnnnnnnnnnnnnnnnnnnnnnnnnnnnnnnnnnnnnnnnnnnnnnnnnnnnnnnnnnnnnnnnnnnnnnnnnnnnnnnnnnnnnnnnnnnnnnnnnnnnnnnnnnnnnnnnnnnnnnnnnnnnnnnnnnnnnnnnnnnnnnnnnnnnnnnnnnnnnnnnnnnnnnnnnnnnnnnnnnnnnnnnnnnnnnnnnnnnnnnnnnnnnnnnnnnnnnnnnnnnnnnnnnnnnnnnnnnnnnnnnnnnnnnnnnnnnnnnnnnnnnnnnnnnnnnnnnnnnnnnnnnnnnnnnnnnnnnnnnnnnnnnnnnnnnnnnnnnnnnnnnnnnnnnnnnnnnnnnnnnnnnnnnnnnnnnnnnnnnnnnnnnnnnnnnnnnnnnnnnnnnnnnnnnnnnnnnnnnnnnnnnnnnnnnnnnnnnnnnnnnnnnnnnnnnnnnnnnnnnnnnnnnnnnnnnnnnnnnnnnnnnnnnnnnnnnnnnnnnnnnnnnnnnnnnnnnnnnnnnnnnnnnnnnnnnnnnnnnnnnnnnnnnnnnnnnnnnnnnnnnnnnnnnnnnnnnnnnnnnnnnnnnnnnnnnnnnnnnnnnnnnnnnnnnnnnnnnnnnnnnnnnnnnnnnnnnnnnnnnnnnnnnnnnnnnnnnnnnnnnnnnnnnnnnnnnnnnnnnnnnnnnnnnnnnnnnnnnnnnnnnnnnnnnnnnnnnnnnnnnnnnnnnnnnnnnnnnnnnnnnnnnnnnnnnnnnnnnnnnnnnnnnnnnnnnnnnnnnnnnnnnnnnnnnnnnnnnnnnnnnnnnnnnnnnnnnnnnnnnnnnnnnnnnnnnnnnnnnnnnnnnnnnnnnnnnnnnnnnnnnnnnnnnnnnnnnnnnnnnnnnnnnnnnnnnnnnnnnnnnnnnnnnnnnnnnnnnnnnnnnnnnnnnnnnnnnnnnnnnnnnnnnnnnnnnnnnnnnnnnnnnnnnnnnnnnnnnnnnnnnnnnnnnnnnnnnnnnnnnnnnnnnnnnnnnnnnnnnnnnnnnnnnnnnnnnnnnnnnnnnnnnnnnnnnnnnnnnnnnnnnnnnnnnnnnnnnnnnnnnnnnnnnnnnnnnnnnnnnnnnnnnnnnnnnnnnnnnnnnnnnnnnnnnnnnnnnnnnnnnnnnnnnnnnnnnnnnnnnnnnnnnnnnnnnnnnnnnnnnnnnnnnnnnnnnnnnnnnnnnnnnnnnnnnnnnnnnnnnnnnnnnnnnnnnnnnnnnnnnnnnnnnnnnnnnnnnnnnnnnnnnnnnnnnnnnnnnnnnnnnnnnnnnnnnnnnnnnnnnnnnnnnnnnnnnnnnnnnnnnnnnnnnnnnnnnnnnnnnnnnnnnnnnnnnnnnnnnnnnnnnnnnnnnnnnnnnnnnnnnnnnnnnnnnnnnnnnnnnnnnnnnnnnnnnnnnnnnnnnnnnnnnnnnnnnnnnnnnnnnnnnnnnnnnnnnnnnnnnnnnnnnnnnnnnnnnnnnnnnnnnnnnnnnnnnnnnnnnnnnnnnnnnnnnnnnnnnnnnnnnnnnnnnnnnnnnnnnnnnnnnnnnnnnnnnnnnnnnnnnnnnnnnnnnnnnnnnnnnnnnnnnnnnnnnnnnnnnnnnnnnnnnnnnnnnnnnnnnnnnnnnnnnnnnnnnnnnnnnnnnnnnnnnnnnnnnnnnnnnnnnnnnnnnnnnnnnnnnnnnnnnnnnnnnnnnnnnnnnnnnnnnnnnnnnnnnnnnnnnnnnnnnnnnnnnnnnnnnnnnnnnnnnnnnnnnnnnnnnnnnnnnnnnnnnnnnnnnnnnnnnnnnnnnnnnnnnnnnnnnnnnnnnnnnnnnnnnnnnnnnnnnnnnnnnnnnnnnnnnnnnnnnnnnnnnnnnnnnnnnnnnnnnnnnnnnnnnnnnnnnnnnnnnnnnnnnnnnnnnnnnnnnnnnnnnnnnnnnnnnnnnnnnnnnnnnnnnnnnnnnnnnnnnnnnnnnnnnnnnnnnnnnnnnnnnnnnnnnnnnnnnnnnnnnnnnnnnnnnnnnnnnnnnnnnnnnnnnnnnnnnnnnnnnnnnnnnnnnnnnnnnnnnnnnnnnnnnnnnnnnnnnnnnnnnnnnnnnnnnnnnnnnnnnnnnnnnnnnnnnnnnnnnnnnnnnnnnnnnnnnnnnnnnnnnnnnnnnnnnnnnnnnnnnnnnnnnnnnnnnnnnnnnnnnnnnnnnnnnnnnnnnnnnnnnnnnnnnnnnnnnnnnnnnnnnnnnnnnnnnnnnnnnnnnnnnnnnnnnnnnnnnnnnnnnnnnnnnnnnnnnnnnnnnnnnnnnnnnnnnnnnnnnnnnnnnnnnnnnnnnnnnnnnnnnnnnnnnnnnnnnnnnnnnnnnnnnnnnnnnnatatatcttatcctattaaggtaaaaaaaataagtcctacttagttaaataatatagttataataatattaaagtaatttaggaactatagtctataatcgaggatactaaggcccttaataactataaggctaagttaactatagtagtaaagatactaaaaaagaataggactaagaatatatatctaaaatataagaagctttaattatagattaaaaattagtactatattccctatattaatagaatttatatataggtataggtaaagttattatatctaactaaacttaaatactaatagaatagtattaaaaatataatagagtagtaaaataaactctatacttagggtatcttaggaaataggggctaagtttatagggataaataaagtattactaagtatacctatattaagaactatactttcctctataatattaatagaagtattaaagaactccttaactttagagatttcccttatattttctataatccctaaggctctaagaactttagtaattactataatctctatagcttctataatagtagtagcctttttagccttattagctatataggttaagtacttaatattctacttaataatatatacttaaggtatataagtatatataggtaatatattaagagtaatataggtagtagactaaatcttagaaggaagctatactattattaataataaattccttcctataataatatagttaaaacttataaggatataactatactttataaaagagtagtaaatatatttaatataacctataagggtcttatacttatagtctaggtagctttataactagaaaaagtattactaataaggtaatagccctttaataggcttaggggtttctaaatatgatactattaaaatagaagtatattctatagaagttagaaatactaagtacacttattactagctataaaaagctaagtaagtactatatataaataattagttataaaggaaacctctttactattaggataatactagcccttaatagttaacttcaattcttctaattagatagctactaggagcctaaatagtataataaatattagaaatccttcttagatatattagtatcttattaagaataccttactttagactaggggttagctaatatattaactataatattagctagctttaggctatataggctactaaagagtaggtagaagtctataagactagctattaataaggtaacctaataccttaatagtagtatactatatcttagtcttccctactattttactatactatactaaccactctctacctttagaccttattaatactaagcctttatagttctagtaggagaataaaacttattttcctataattatataacttacctacgatatcctcttaatactaataactagggctagtattaagtaactctttaatactatataggatatttactattattaccgcggttacctaaagtctaagataattaaggagcttatactatactactatataactaagtttagtattaaggatactaagataaaggaattatagtagttacttagtctaatagaggctaaggttaagaataaggagagtactaactttctagaggatagtaagtataatctaattaataataataaggaggagaagggaggggaaggtaatagggtataggaggtatctccttcctccttagctagtagggataggggtagtaatagtgatagtaagatagagggggtttagctagatttactagagcctattactctattttatatatcttagaggaagtataagagtagggttaataataattatatatattattagaatatattaatagtactatcttcttaatttttactcctttctttaaattttcctagtattctagctataactaggatatataataatataggttagaaatatattagttatatatctatacgctagaggcctatttatattatataaggcctatataggcccctattataggctataggcctagggtatcagcctataatttagtgtgggccgaagaagttagcctaaagcctagcctattggtaggctgggctgggctaggctataggccgggtgggctttgccaatatctactcctatctagtctacagtcccctatatacctaggacaggtactccacacaccctaacaggtacaatacttcaggcatcagccttcttagtactagggtcctgacatttatatatatgacctgatttctgatccaaggggggcctttaatatatagcttatagaccttgagtattgaaattgaagaaagaagcacaagtatcagcaactagtctatatgcaccataagtgactagcaccacaggcaataaattccagggaagactatctagtccttattgctgcctgataccataaatatgagattaggacatgtcacccataagatcttcatccatctcaagtccagcctccacccctacaatgggattgacttcactagaccccgaccaaacttgacccttgtgtaggctatcaacgtactcatcgcttaatcccagattgtgattagttttgccaagattaataaccatggtctccatgagcttcatctcttgcttgagttgggactgtaagtccaactcatgagagagtcgaggtaacgaatggatggatgagaaccgcagcatagaagattcagcatcatctttggtctgtaccaatgtcgcgttcaaatcacgagacatgatgagggatgaaacagcggatccagtaacttcggcggacacaggggaggggaacacctgcttcgagaggtcgaccatcgttaaagctgcgaaggtcttcccaagcttgatcacggtttgactgaagaaagcacccactacctgggtaacaagaccgagattattgtcctagagtggcggcattagccctggatgtcaaaacgataccacctactcaattagcaccacaacttaccgcgcaccagactccattggcagcatcaatttcagcattaagcctcttcaaatcaccacgttcaaatgcatgagcaagaatgatatagggcctcgcaattgattgatacactttagccacatgaggtgttgtgatgcttggaggcggacagagctgtccacaaaaataattagcttgagaaaacaatgctgtcgagtctcctttcttttctttctcagatatcttaccttgcctttttctagcaagcttaccagcacccattttttgtaggcttccaccataatcaagctcacggagttagtactaggtgtagagatgacaatcccaaggaaatgaagtgcattgcgccactccttcaacgccatgtacaccataccaccataaagaaagtactgcaagtagtctcgatatgatagcttggatgaaatccgggaatcttcggtcataaaggatacacctgacccgtgatctgcgcagagcacagagggatcggaagggggacttcccagcgagattgggaaatgacaaatctgcttatccaagaccggcaatgcacaagaatacgccttggcctcgagacaaagccggacaagcaaaaggtgactcgaggtgaaaacggcacatgatgggtcgagacgaagcatagcgtctttgaccagcgtagcacctagcagtggctgtagtagggttaggttagcaattagatataagaaaccttgaaaaatagccgacttgccattgatgcagcttgtgagacttgccccactagctcaataagttggcgccattctcgcccagcgtatttgacctgaaccccatcgaaactcgtcaaaaaatgtgcagcgcatatccagagcttcccagaggggcgaatatctgctggaaatgaatcggcattcagttcctgtgccttttgtatttgcacatgtagcacgaaaagatatgggatagaatctatcgctggatcaaaacgctaaagacaaatacatattagttgcgatcttgccactctatagaaccctctcagatggacttgatacaaataaagctgcttacatcgagaaaagactcatcattagcaagtgagtcgagtgccttggttgtttgtagccgcctgaagtattgaactagctcgcgaacctgacggtcatactcatcgctgggtgggtgattagagttgtgtaactgcgccgatgcggagataatatccgaaaggagtgtcatcctggaagtgtatgaaagagaagcacaagatagctcagcgtcaaatgcgcaaaggtgtgttgtttctaaaaccagtgtgatatcttggctctcgcttttatgatatcaggattgccatacaatagagactcaaggttggacgaggaaaagagagcgaaagaggagaagagagatttggtaaagtgttgtaaaagaaacgcgacgtaggtagttgtgatgattattggagacatctggacctcggaaaggtgggtaaatccgagacgagcgggatcgataacgtacccctccacactgagtgtgactcaattttttcttttctctttccctttcctctacttctacaactttcacttctctccgacgattatcgttcaatctatataggagcggaggttatttggcaccatgtcattgaccgaatccgtagcagttgatgtcgcccatagcgcatcacttgcctctcgtcgtcttgcaactttaaacaacgatgaccgcaataaagctttgacgttgcttcatgatgcattggaaatgaaccaaaaggacatccttgaagccaatgctagggatgtgaaacttgctactattgcagccgacaatggggatttgagccatagcgtgctcaagaggcttgatctgtcgcggcctggaaaatacaaagatatgcttgatgggattttgagtgtgcgagatttggatgaccctagtgagtttactttccaatctttaagcttcattgagacagtacttaatagtatacaatcatagttgggaaagtcacactgcgaactctccttgacgatggtctgacattggagagagtcagctgccctatcggtgtgctactgattatctttgaggcccgcccagaggtaatagcaaacatcgctgcgttagccatcaagtcgggtaacgctgctattctgaaaggtaacacgcaagcccttataaaggtttcatgatattgttccattgacgcaaatttctaggtggaaaggaatccatggaatccttcgcggcaatcgcgaacgttgtctccaaagctatcgccgaatctcgcgtaccggtatcatcgattcagctggtcaagacacgcgatgcggtgtcttctctcttggcccaggattcgttaattgacctggtcattcctcgaggttccaacgaactcgtccgtttcgtgaaggacaacacgaaaatccctgtgcttggacatgccgatggcctttgttctgcttacatacatgccgatgccgatatcgatactgctgtgaaagtgattgtggattcaaaaaccgactatccagcggcatgcaactcattggagaccttgcttgtccatgaggatacccttgaattggtcttcccggcggtagctgctgctctcctagagaaaggcgtgacccttcgttgtgatcctgattcaaaatctgctttgaccaagacattgccagccgagaaatcagtgcaagtacaaacggctaccgaatccgactataacactgagttcttggaccttgtgttggcagtgaaaacaattccctcgactgaccctccaatcgcggccgtggaggctgccattacccatataaatatgcattcctcaaagcataccgagataattttgactcggtcaaaagaagcggcggatatgttcatgggcggaattgatagtgccggtgtcttctggaatgcatctactaggtttgccgatggcatgcggtttggatttggtacagaagttggcatcagcaccaacaaaatccattcccgaggaccggtcggacttgagggcctgaccatctacaagtacttgatccggggaaatggtcacggtgcagcggactatgacggtgaaggaaggaaaaaatatctgcatactagactgcccataggccagtaatcgcctccagcgcaacgcatcaatagaaggatatcattttagaaaatattttttttcttgctttcttgtttgaaaaatcccataagaaaaaacttaggacaaagcctgattcaattttcttttgccccttcattcgtaaattctcatttcccagtccaaccaaagacatcccgccacttttaagtacacagacttgaggcctttggctagaactgaaacgattccaggcaccgagaaagtcaatgtggccaatgcatcttttacaatacatacacaccgcattaccctcatcaagtcccttagaccttgaagcccttggaccttctgcgtccacgggcccgctcgaacttgcggcccttgcttgccacatacggcttctgttttgagtcagtaaatttgaatcacataatctcgttttccagtagtcgtaatcataacgcaccttgtcggtgtgaggaccgaagccgaagtgcttcacggcctcacgggcgttcttaggtccacgcaggaggagagtgttggcaccggtaggagcgcggagagcaagctggtcaagagtcaaagtctcaccaccagccttctcaatgcgagcgcgagcggtagcggtgaaacggagagcagcaatcgacagcttagggacggtcaaaaggcggttgtcatcggtgacagtgccgacaacgacgacggtcttgcccttctgcgcctcgctgatgttggcgacagcgcgagaaagtgaaacaggggggcggttgattctcgacataaagagacgacgaaggacggccttgttaaagttggactcagtgcggcctatcacgcatctcatatcagcctcacgaaaatccccacaacggtatacctgtagaaattgcgctgcaaacgaatttcggaatcgggaggagggggggggggggggggttcaaaggacacaannnnnnnnnnnnnnnnnnnnnnnnnnnnnnnnnnnnnnnnnnnnnnnnnnnnnnnnnnnnnnnnnnnnnnnnnnnnnnnnnnnnnnnnnnnnnnnnnnnnnnnnnnnnnnnnnnnnnnnnnnnnnnnnnnnnnnnnnnnnnnnnnnnnnnnnnnnnnnnnnnnnnnnnnnnnnnnnnnnnnnnnnnnnnnnnnnnnnnnnnnnnnnnnnnnnnnnnnnnnnnnnnnnnnnnnnnnnnnnnnnnnnnnnnnnggggggggggttcatacgagccaagaagcggtagagcttcaccagaaccttcaagtagacgttgtcgctcttgggagccttgcggtggctgctccgcacatggtggcggtccaagtcgatacctgcaatttatgaacggtcagtggaatgaactgacaacgagaagaaaaagcgaaggggttcgaatgaatgctgcgggatgcgataatcgagtaaaaggagatgattgaacatacccatggctgtgtattggtcgacttcccgggaaatagcttgctgtcgcacccgtatggaaagtgcaggaggtttttgatccttgactttcggctggacagtggtgtgtgggtttagccctacgctagacctgactaggaaaggcgaggcacatgacctaagtaaagccacgtgacttgtacatgtttccattcgccacttggtcacgtggtgtaggggtctggttgcatctaacaaatgaaccttatcttcagattctgttagttatctgccgtgcactctgtacgtctacatctccaacctacatcaacatcaacaattctgtataacagaacatttcatctactctttatctatgtgtatatatgcattatgtataatcaaatgttaatgataaaaatgagaaaaatatatctaggcacatatgttattagaactattctccatcattcaagccgacaaagaaatcacgagtcatttcataactcaaccagctgcttgccatactaggagcaactttcagaagattcggccctatccccttgaagagtccacgtagtccctcttcagccacgatgaccctcacagcatcccagatcgaggtgtattggtaacccattcccgacattgtgttgatctggaatcgccgacgtaggacatcactaagggaaagtcagtttcacggggcctagccaaatagaataagataaccgacaaaggataggtacaggtctgggcgactgccccagagaccgcgccggcgagtaattttcgacaagagctagggtttttgtccccttctggtgttagatacttgcgcgccgattcgtaggtcatgaaattgagtcccacctgtggttcgtcagttgtgaccaagtcaaattaagctgaaaactcacgtatggagctaccccagcaacagtaggaacaattccacggtatagagcctttgttccaccttcattcttatagatcatggttattgtcgtgaacatgcctggcagtttctggcttggatctcttgctccaagttcggcaaatgaagcagattgaatggaaagtcgtgttcgaacaatgtccagaggataggtgatagtcaccgaagtgataccggcaaggccgccacaaaaaaggcgaagcatcggggtcatctcaccatcgggagactctacgaactgaatcaaagaaatgtcagtttgcatcaaaccctagttctgcaggatagaaatagccacccacttgcttataaaaattatagcttccaaactgtaccgcagagtaggggataatgcgaatacagtttgttccatttcctcgcatgaagccccgccagccttcttcccgccccatctttactaaggctttccagattgacaatctgtattctgttcgaccgacgctttgaatctgaagaaggattttcaatctttcgagtggcgacactattgtcctggaaactgcaccagccactccaccagccataaatgcagccaccattggttcggcgaggtacttcctagtacgaacccagattgagggagttttctccttaatcagctcctgcttaatcaactagtcagcctcgcagcgcatatggaccggagatccccttctcaccttagctgcatttgaactagatggaaacttggatagagtctgcaaggcaggctttggatcaccttccaactgctccttttgaacatcctggcgatctaagctcatcttgacgatatgcacatccggttcggcaatgaggttgataaagaagtcctttgtgatctgccgtgtaatgattttctgaaattattttaattggagaatgatgcttgattgtcgctgaaaatcaaatgcgatataacactattgatgtagtgctagccatgaagattgattgttttccaaggcttggtgatctaaaaacacatcattgattttgtgtcaagtggtgtattgcttttttttccaacggccatataactgaggtataaagggtaatgttgatagtggatttgccaaaaaggagaagcgtcgaaaagaaaggacgggttgttgggccggagttgcttttcttttccccttcaatgttgggaggagatgtcgttgaacaggtcaagagaaagaaggaataagaacacaaataaatcacacaagaggtggtatgtatacctggaaaaggtgcttggaggtttagaaagagaagaacatcccgacttaccgacagacacggtacctcccgatagtccgccacttatattacgtacctacattggggggtccacgggcgaactagttacatagtatagttccctcaaaccgattgtataagtactccagacagatcaaatctagatctagatctatgatttaaataaagaatattacacttgtcaagagcctatttatcaataccaagtttctctcgtaaaataaaacagagaagaaaaatcaaagaaaccaaagaataaacctttcatcaattgcgtcattggcatgtttgatccaccgtagcacctttatcacgatttctttcttgcgccctctctctcttccttatactctttatcctcttgaagcttcttaagctccatctctcatttcaaattcttccaaatactttccaactgacacaatcttctttatttttcattgctctgtgctaacggcaccatgtcttctcgctctggaactactctgtatgttaccgggtttggccatggcacccgtgctcgcgatcttgcctacgaattcgaacggtacgtgtcgcctataccttcgcctctacgaacttcgattcccatccttccgacgacctcccgatgaagaccattggcactaaatgccttggacgacactcttctttctactagcgtgacattggtgtggaagcttgtgtctacgttgccccgtctcactccttgggcaactgtcagctagtcttggtcattccttatcataatttctcttaataccgatacctgaagctagctcaactgattttggaactagttatgggcgtcttgttcgctgtgatatccctgccccgcgcactccctctagccgactgtgagttgaaatgatatctgaaaccactttacctgtctaatctaagtcgcttagtttcgcattcgttgaatacgagagtcgccgcgatgccgatgatgcttaccacgagatgcacaacaagcgtatcggccgcgatgatttgctgaagattgaggtaagcatatccgcccccccgaagctttgttaaatatcttttaacctatctccagtgggcacgtactcctccctccgcttcctggcgctttgactctggctctggccgtgacgctccccgtgacgctccccgtgacgctggccgcgatgctggccgtgatcgtcgccgtgatcgcactcctcctcgccgtggtcgttctccatccccccgtcgtagccgtggcggcgactattccccccgccgagatgatcggtacgaacgtgacgccgaccgtaccgaccgtgactacgaccgccgcgaccgtgatcctgaccgccgtgaccgtgaccacgatcgacgtgaccgtgaccgttctcgtgaccgctctcgcagccctgacgaccgtgaacgcgatggcaaagatgaccgggaaagacgcgatgatgatcgcgagcgtcgtgaggaggaccgtgaaaacggccccaacggtgaggacaggaaaggtcagttgcctcggaatctaacctagaaaacgttcttttcactcacatacagcagtacccctggacccaatgccttctgctcatgatgagcttgatactgctgagtagataaactcagtattacgttcattcgctctcgaaccatgcccccgtcgtcattcttttttcgtcttctgaaggtgtccttcattgcggttgagccaacggggagggaggatacaaagttatcgcccagtgtttctcttaataccaccctgtggcatatctcgtatctcgtccccctttgcctcttgtgtgcttctgatttcaaatggcatgaagcttgctcttcgggacaagctggagccaagtgaatgtgtgacccttgctccccctaccttttttttttttcgaattttccttttccccaagttattcccaatatttcttttttgaggttggtaatttatcctggtcagcagctcggatcccaccgaagcgaacgtcgagcgaccgttccaagtcggcgcccaaaaaccacgatgaaatccgtttcgcccttcgtcttgttcgcaatttaatttgaaagcggttatttcaattcctcgccctctccgaccggtcgccatcctatgtggtctggtattttctaaaccactgtagtgccttagttgtatgtgaggtcaatgcaaagcaccagttctatggctttgttaataacaaaaaaaagcaatagaatttctgagatcatgacatgacgtaagctatttggcgcggggaaccgcaatcaatccatcaagcaatccagtagaagcatccctgaagcccaaattattgcagctttattcaactttcagctactttatactacctcctgtcatgagttcagcaaagaaaacaggtatcagcattgctatcgatgtattacctcccccttcactactttattcagaacactgacataacaaagagaggcggcacatttacagactgcattggaaatccagggacaggccgcttggaagatgacattgtgattaaactgctctcagaagaccccaacagctacgaagatgcacctttggaggggatccggcgtattctttccaaatttaccggtcatgaaatccctcgtggggaaccaatcgatacttccttgattcagagcattcgcatgggcacaaccgtggcaacaaatgcgctactcgaacggaagggggagaaagtggcactagtggtaagcaagggcttcaaagactgcctcgagattgggaatcagtctcgtcccagaatatttgaccttgctatcaaacgtcccgatgtcctttacgaggaggtggttgaggtagacgagcgtgtcactttggaagactacgcagaagatccgcaacgaaacacaactgccactactctccgggaacaggcccgggcagaagacgaggttgttcgcggcctttcttcggaagcagttcgcatactaaagcgcccatctgagggcttggtgagatcacaactgaacgaggtatatgaccgcgggattagaagcatagcagtatgtcttatacatgggtacacctttccagaccatgaggcactggtgggaagaatcgccaaggatattggtttccaccatgtgagtttgagccaccagctcatgccgatgattaaacttgtgccgaggaccacttcagcctgcgccgatgcatatttgacccctgccatcaagaagtatatctctggattccaagccggatttgaaggtggtctaggcagtgaaagtgtcaaacagcaggcgagcgccaaaggtgctcgctgtgaattcatgcaatcggatggcggtcttgtggacgtggaccaattttcgggcctacgagcaattctatcagggcctgctggcggagtggtggggtatgcgctgacttcctacgatcccttgtcgaaaataccagtaatagggtttgatatgggagggacgagcacggatgttagcagatacggatccggtcggtacgagcacgtctttgagacaaccactgctggggtgacgattcagtctcctcagttggatatcaacaccgttgctgcaggtggtggctcgaggttgttctaccgtaacgatctcttcgttgttgggcccgagtcagcgggagctcatccaggacctgcatgttaccgcaagggtggaccactcacagtaaccgatgccaatctgtttcttgggcgattggtcccagacttcttcccgaagattttcggctcagatgaaacccagggactggatgaacaagctagtcggatgttgttcgaagaattaaccaaagaaatcaaccacaagttgaccaaagggggccaaagtcgagaaatgtcccctgacgaggttgccttcggttttatcaaggtagccaacgagacaatggcccggcctattcgatccctgacagaggccaagggacatgacacatcaaaacataggttggctacgtttggaggagccgggggccaacatgccgttgccattgccgagagcttggggattcggcagattttgattcatcggtattcctcggtgctctcggcatacgggatggcactggcagacgtcgttgatgaaaaccaacagcccgaatcgaagacctgggctgatgatggcaaggaggaggttcggtatgcactttcttcaagaatggaagaattaaagaaacgatctacgcagaggctgcaagaaaaaggcttcgacaatggttcaattgtgtttgaagaatacctcaatatgcgatatcgaggcacagaatctgccttgatgatacttaaaccaagcaaagaggaggccgatcttcactttgggggcgacgaatgggcttttgggaaggcatttatgaagcaacacgatcaagagtttggttttactctcccagatcgggacatcattgtggatgacgtgcgggtgagaggaatcggcaaaggattcaaaatgtccgagaagactgtggaccggcagatccaggagtccaacccaaaggatgtgacgacgggccaagaacatcgcaggtctcttgtatacttcgagggcggccgacttgaaacgccaatctataaactcgacgacttgaaggttgatgagcgagtaagaggcccagcgattttagccgatgccactcaaacaatcgtggtgcccccagaagcttcggcgctcttgacaaaaacccacgttgtcatcaatattggggaatctgatgccagccagccaaagattagcactggtaatgtggatcctatcctgctgagcgtcttctctcacagattcatggctattgccgagcaaatgggacgtgctctacagaagacaagtgtaagtaccaacgtaaaggaacgacttgactactcctgcgcattgttcgacgcagcaggcgggcttgttgcgaacgcgccacatttgcccgtccatctcggtagcatgtcaacatgtgtacggatacaggcccggatctggcaaggtaaattgaagcccggcgatgtgatcgtgtcaaaccacccggaatttgggggaactcatcttccagacatcacagtcctgcagcctgcttttagcgagggaaagatcatattctacgtagcttctagggcgcatcatggtaagaccccccggcgaaagggagaagggggaaacaaacagatatactaacctgcatgaagccgacattggaggaatactcccgggatctatgccacctcattcaaaagagctttaccaagaaggcgcagccatcaagagcgaaaaattggtatcagaaggcaagtttaacgaggagcgcatcacagaattgctgtacaaagagccggcccagtacccaaactgcagtgggacgagatgcctagcagataacttgaatgatcttaaggctcagattgctgcgaataagaaagggatcaacttgatcagcactctaatcgaggagtacggcgaggatgtcgtgcagttttatatgcaccagatccaagacaatgcagagctcagcgtccgcaatctactaaaagacgtgagcaggagatttgctggtcaagaactgagtgctattgattatatggacgacgggagccctattcaattgaagatatcaatagatggggagaaaggagaggcaatcttcgattttgagggtacgggcccagaagtatacggtatgagagtggctttcaaggtgaaacctgatgtatgagctgacaatgacaggcaatatcaatgcaccggaggccgtcacatattcagcgatcatttattgcctgcgatgccttatttcagcagatatcccattgaatcagggctgtttaaagcccattgacgttcgaattcctcctgggagtcttctatccccctcggaatcagctgccgtggtgggtggcaatgttttgacggtaagattagacagatactgacgttgatcatgggctcatttcttatttcttcagagtcaacgagtgaccgacgtcattttgagatgcttccaggcttgcgctgcgtcgcagggtgataccaacaacctcacatttgggtttggagggaatatgcccggtgagacagaaacgaaagggtttggttactatgaaaccatcgccggcggtagcggggctggtccgacctgggaaggcacttcaggggttcatacacacatgaccaacacccgaatcaccgatgcagaggtgtttgagcggcggtaccctgtgatcctccgagaattcagtcttcggccgaattcaggaggtaatggtcaacaccgcggcggggacggcgttgtgcgagacattgaattccgtattcctgtgcaagtctctatcctctccgaacgaagagtctatcatccatatggattggagggaggcgaggacgcccagtgtggtcagaacatctgggtgcgccgcgtgagaaagcatgacggaagctgggaggaaagatatatcaatctcggcgctaagaattccgctcagatgctagcaggggagcgaatcattatccgtacgcctggaggaggagggtggggccaaatcggagaccagcgccaacttctcgaggagaaagatcatcgtcatgcttggcgggggggttctattgccaacaacatggcgacgcaggaggcgagtatatgatttatagggaaatttgggagtgagttgattcaatcggccaaggtcaatttgattatgataagaacgacaagggctatttatgggcaacgtaaattaaatcctccatggcaattatgcttcactctcctcatcacttgtcgcctcaatattctgctttgatagaccttggttgtccgaatgagcatgtccttgctctccttgatcggacaggccaccctctgccgagtagacaggccgaggcagagtttccccattttctttcaatgcctgctcaatctcaggtagaatagagacgatagtagcgaattgatccacgggcattgagataccctacgttgggaatgagagtattagcacggtttatgaaaactgactgatcaatcaaccttttttcctggcaactcctgcccgtccttttcatagtattctctaacattcacctgggttttcccacggaaagaagatatggtcaggcggcgcattttggatatttcccaatagcgatctccattagagtcgattttggtttccgctgtggtattgaccttggccttcttggggcgcacgctattatcaaggccaacgccggagtcagacgaacgtttcctggatgacatgacttgaatatgatattgggaaatgcgattgggagaacggatagaaaagatagaaagagtaagaaagtggaaaggtgtccaagcacgaatgcgaaacgcgaaacgcgaacacgtcatcacgtgaagaccaacattatatactccgtgttcatctttgacaattcctacctacatgtggtctctcatgtatattccaatatgatccattgaacatttaaagagtcaatactctaaggccctgtagtaaaatcgagaagacaaatcctcgagcgacactctcaacttgaagactatcaaagatcttctctagcgcttctcgactagcagctgcccccataacacttgttaaggcctgtggaattccccgctgcacaaatagtttacgtgcagtatcccgtaatcggatcttctccccctcactgggtggagagggccaggctttaagttcctcctctgtcggaagcgcgttctcacgaagcttgacgaggtaataccccagggcgtcgtccgaagtgtggccttctatcatggaatcttgcaacagcgtacgaatagtttccaatgtcgggctgccgggacgtagaatatacgatttggcagcattcagaagggtccggcgtatgttccacgcagacgacaaggtgtacaactcattgatgaccgcaaagatcagctctactgctattttcgtctcatcagctgtgatgggattcccctgattgcggggtttatcaatactctgcccagtatctgatcggcgatgtgatgaggtttgatcaatagtttccgttgcccggacatcaagttctgcagtatgatcgctgatatcaagtgaggttttagagggtgagatctctgtggtccatgcaccccgttcactctcaaacgactctctggtactgccaaccgaagacgacttggaaatttcgcctccttggatttccagggggtcgctagggaacaccataggcgaatcaacgttttcgttgcttacgtcggtacgatcagcaaagctaaaccgtgtctgcgaccggatggcgcgactggagtcatcaactttgggttgaatctgatcagcaccgacagccggtttcttgccattggcggtgccgccaaacacccctgtcattccttcaaagacggctttaccgccccctgccactcccctgggcgcattggtcaatgcacccagcatacccttgcccatgtgttcaaacgcaatttgactagggaaagagaatcccggtttgttgttacagctaggttgagtggaagcaccagcgtctttttgcaaaaatcgccgcattcgatcagtgtcggcaagtgactcgtgcttcatggcatcttgtaaataccacccaaggtcccgagcgagagctagtcgtgttttgcccttccaggtgggcagtatggggtgacgctccgagaaactcgaaatctgattcaatcgtgaaacggtccccagtatctcgtgaagagattggaagtccgaatatttgcgaaacaccatccatccagtcgagcgtgttgacgctggttcgacctgtagcagataatcccacacgggtcgcgacttgatttggcctttttcatcccttgctccatcatcatctaccaacacttgtgccccatgaagaatcaaaggtggcacagaagagtcttcgaatgatttcgggcttgcaagtgattgcgtattaggtatcggcccctggtcttcgtggttttcgttctcatcagtcgtgtctgaagccaaatcagtgttcaaagggtaattttcgtcaaattgttcgttttggcgcgtccgttctgactccgagttctgtgtatcgtgggatacaatcatagcactcagacgtttcacctctagaaccgcctcttcctctgtagccctcgctacatgcatggaatctctctgtgtggctttgacggagtctgcctttgggtgttctgaagacctaggagcactgacaccctggttccgtgcaccctcaacgcctgcgtcgatagcgtgcataatttcggattcaccgccctgaagaagatagataatccattcattgataaattcaggacgggcaagactggtaacagttgaccccaatatcacgcccgcaaagacctcacggaggaagtcccgtacagccggataattgtaggttttggcatccaagaaattcgacagtatgtcatccgcgatcatgctgagttttttcttttgttgttccgcagacaagacattcgctaggctgctatccgggaattgttcaaggtattggtccacggttttttgggcttccgtcggggatgagctcgcagcagtgaatgctgctgcaagttcattcaagaatacaatgacgatagatgaggagttggtgagaaactgcaagaacgtgtcctctgttcgtttccgcgagaggtgcgaagaaactgaagtaatgaaatgagtcaaaatccttcgacaggagtctggaaaacttggctcggacggtaaaagtggctcataccagtatctttatttgggataagctacttgtttcacggttggacaaggggacgttaatagaggatacttacttgacataatcttgaatgacagcatcggtgagcgttctcagcgcgacagcggtggccggttggaaggtggcatactccaagtctgccgaagacatatcttccagcgtgtttatagaaccatcgtccccctggatgtctgaagcaccagcccgcctcggccagtctaaaagtctgttggagacttccagggcaagttctctacgccggttgggcttttgcacgtgggacgcttcttctccgtgttcgttatctgatccctcccaggacgcgtgtaggacaacccccacagccactccaatcagaagtagaccgattctccccaggacaatataggtgacgagtgcaagaagcgcaaagactccaaggagggtctcattggtagaggttgagagaaaattgaggatagcattgatgagttcctttgagatcgctgtatttaagatgggatctttcgtcgtgggagtattgtggtctttgtcggatggagctgaaatgacttcggagtcgtcatcactgaggcgactcattgtgctgagatatcccgggtttggagggtatccagagtaactttagttaaccctccatgtcaaaatcaaatgtgagtgaccttgtagatctgtgtagacaagaaaataaggggatacataactagcaacctgggaaaaatgcttggcggacttggccagtgcgtacatacctgacactcgtactccggtataagaaaagaacatttagacttcatggatgtacggaaaaccatagacaaagctaaaccgtatatataatgtattgtatgtatccaatcatgatttccttacaagcatgagctatatagcaaggaatctaaagctaacagaaaggagttgatcttcgctatccgagtgaatctgagcattcaaagagcatgcgcttcatgccagatgtaaagagattgcggttgggagaaagaaaagggaggtactctacaggggataacaacgacccaaaaacgacccaaaaacccatctggtcgggatatacttagtatatgtggcccttgggcaacaaaccaccagtcctcatgcggcgttcatcgagaggtacggtactcacttcgatgaaatccaaagacataaattccgaccgcattaagaagaaattcatggattgactcgaggaaataataccgtcggagattgatgaatggtcatgaagaaaactggaggaacaaagatagacaacaaagaagaacgaaagattttgtaggggaattttatattacctaatacttagccgacaattcctcgacgctagtcccattacagttagattacataactggagccgaggtcagttaggtgggcatacaagcctcagatagtgtagtgtatttttccaatcatttcatctatgtttttgttttcgtttatgcctctgtcttctagaaagcatctgcgagagcataaagtgattgacatcctcatctccccaataggtgagatggctagcaatgctggctatcaatgagatatcgaaggctcccctatattccgtcaacaaggttcaacaatgcagggcatatagtcttactcttggatgctgtagtccacacggccgtttgcattcaaggcacgcacttttgcgtcctcgaatttcagcctccgatcctggttagtgtcggcatcgggatctagactctcgccatgatgaacactcctgcttttttggaaaccatcgtaaagagtttctagatcagattcaatcaatgtgtgatggtgatcgtcggatccatcgggtgtatgctgagctgagcctgactgtgaccgtctatggattgattcatcacctattttactacaagtccgagcagccgatgaggcgtcatcgccattcagacccaagctgcgattcaataaactgcttgcaacacccgtggtaaaatttgtccatagggatcccacactttgacccatgcggctaccgagaatagacagactctgaccagaggtcgtccagaggcttttcttcaccgaaggtagaggctgaggcttcagggttgccatcgctggagatatcaaaggctcgacccggtagctcaccgggtcagagggatggaagatattgtagagatctcgacaccttggcgttgagatgataccagcattgtcgctgagcgtatgtctaggaccatgcgagtccaagtcgatctcgacatccatggaatttttgcgatttcggggacctaaggcagagtatccaccaatcgtcttacccttaagcatttgaaatagtgcaatgggtgatcccagacagaaaaactcttcgcagtcaaactcaaacgcacttgaacccttggggtgggccgagtcgtcgctctcatgggccattcccttggaggcaccattctgtccggtattgcttcctggctggtgacacaagatgtcaaatagaatcgcacttccaagcgaatggccgcagagactgactgaccccttaaaagaagggttttgcttccggtacagccggaggattcgattgcattcttggatgacaatattggagatatgttcacagtacccgctttggtacaagagtacatccatagccaaatctgaaatgaggtttcgaacagcaggtacactttccagtgttatatcggacaagctggggtaagcatcatcctcgagagcgtctgcatcagtaagatccagttcttttctgttccgccgaactcctcggtaaggaaagtccagaagatggcgccagcacctgctgaaattagcaaaaagaaatgccgagcaaaggaatcagtctcacacaggaagcacttgaacacggcagttcttatcgctgtctggatgcgccgagttcaacgcttggaggtcaggtgaacctttgtagacagtttttagcgtcttgcgaagcacatttacatcgtgtatgaaattgatgctttccagtcgcaagccgagtcgctggccaattccgtgggtgacaagaactagatgatcaacctcgcgctctctgtccgcgccgtccacttcccttgattcttccatctcctgttcctcctgcctacgagcctgttcctcgaggtcagctggattttgcggctcgcctgcgagggaggacatttggcgttctaatgttgatttcgatccactttcgtagtccttgaacccatcagaggaggttgacttgtctgtgtctttttctgtcttttctttcaaggcctcattcaaacctttggcggggtttgactcgcccagtggtttttgtttaggaccctttgcttctggtgtctcttttggctttctgggctcgaaaccgcgaaccaactttgttcccggaacgccccctagcttttgatataccgaagtactgaagcgtgacatgaaatcatcgttcataagccaggccgtcgtggaatcttgataaccgactatcctattcatgtaagcgccaaagagacgatactgctgaggctccactgtaggactaggactgctggaatcattccctgcggtacgaggagaagagttcgggttgattgattgaggggatttgggatctggctcaaaggtgttgattggcatctgaccagatctatcttcttcgtttgcttgcgaattctgttctgatggctgggacctccatggacacaatttgatatagccctcttcaagttgggtagcaaggttttcttcacatggttttaggctagatccatcctgaatgaaccacgttccacgacggacttcatacacaggaccaatccaataggtaggactcaattctcgttgttccacatcgacattgaaaagaaaatcctcattcacaggcactttggtcaatacaggttcgctgtcgtttggcgggttctgttggcgggcatcttcgatgtctgagagtttctggaacgtcgcttcaatagactgagagtctttccctgggaaaggtatgaatttcttcggcgatggtaagggcttttggtccgcctttttctgtcctattatggacggtttccgcttgggcgagtccactgcgtagaaccacctgactttcgatggagggcaatcgggaggatagcgtcgcatgcttaatcgatgcatgtgggtcaccgtgtggtcctccccttgcgaccgctgcaagacatcctttttctggtgatctccaagctgccgtgttgaggttgcgctttttggtgtactccatggagtgagtgtccccaagaacgacttctgctctgcacccgccatggggaggagcgcccgtcggaaggtagcgaaacaaaccaacgtgaggagctgggttgaggaacagcgaaagtgtcggcacgacgtatgaacacgaatagagaaagggccgcggccaaaaaggtgttcaaaacggtaggcaggtgttggcgttgcaatgaatgtttccaatttttggagatgggaaatgatgtaatcccaatttcatgcaattacgttgtaatgtacaatgttataccgtaccatatcaacaatgtccgttcttgacataggcccgttaattatagatatatacatatttctatataaggtcccaattccatgtattcatctttcattgatagtctaaagagttagggactataagccgtggatacgtcaaattcccgaggtcggcgtatatatggctttttctcagtcaattgtggcgaacaccagcataatgaccagctaggtagatgaaatagtttcatgaaaggtcaccatgttatatatactacatagataggtaactaggtaactaggtaactataacatagtatatatgtaagatgtcgacgtcatcagaagaacttcaacgttccccaatacgataatacgagaacacggcgttactgacatgatacttacgctctcatacaacaatacccctggcgtgatgtactctgtatcgttaaccaactactttcattacggtgtggctcgtctccccctcggttcgtctatacctggctgcctttcgctttgcactgcccaccttgagcacgcatcggatttcttctgatcctttgcttactttacctcttgacaattgatctggctcagggtgtaatctacttccctccttttttttttttgtcgcaacacagtctttccctgggtgaacccctcagctgttttgccccagggttgtgactcctgacaagatgaacgtcttcaagcttcagaagtacattctctctccgttcaataaaaacaatatgctgaccattgcgatccatgtaggcgttttccgcagcttgatcaaggcgagatattttcgctccaggatgcattcaacagattggacgtcgaagaccgtggctaccttgatgaatctaccgtgatcaaagctgctcaacaatcagaacgccagccatatgatgtggtgcgtgcagctttgaaggatgtggagctcgacagctcccggcgcgtggaactcgaagattatgttgatgtaatacaatctccccgcttccctttctcaccccgctggtattaatggcatagcagctcgtttccaagctccggacagcccctactgaaggtgtccgcgcagcagctacccccgcggctgtgatccaagaggccggcgctggccctggagcatctcgacatgtctccaaaggcagtgtgggtggacgaatccatgtccaaggatcatcctccaatgtcacgcatacgatcaacgaggatgaacgaacagagttcacgcgacacatcaatgctgtcctggcgggcgatccggatgttggcaacctcctaccttttcccaccgatacatttgagatgtttgataagtccaaggatggcttggtcttggcaaagttgatcaacgatagcgtaccagataccattgatgagcgcgttctgaataaggccgggaagaagatcaagcagctgaatgctttccacatgaccgagaacaacaatattgttatcaactctgccaagggtatcggatgctcagttgtcaacattggaagcggggatatcatcgaagtgcgcgagcatttaattctgggcctcatctggcaaatcatccgccgcggtcttcttggaaagattgatatcaaacttcacccggagctttacaggcttttggacgaggatgaaactctggagcagttcttgcgcctgcctccagagcagattcttcttcgttggttcaactaccatttgaagaatgcgaagtgggacagacggtatgtaccgcccgagggggacacaaataaagacatatggctaaccgatgtagggtgacgaacttttctaccgatgtcaaggatggcgagaactataccgttctcctcaaccaattggcacccgatatctgctcgcgtgcccctctccagactcgagacttgcttgagcgggctgagcaggtcctccagaacgctgattcccttgattgccgcaagttcctgacccctacctcattggtcgccggaaatcccaagctaaaccttgcctttgttgctaatctgttcaacacccaccctggactggacccgattaccgaggaggagaagcttgaggttgaagacttcgacgctgagggtgagcgagaggccagagtcttcactctgtggttgaattcattggatgtgcagccggcggtcaactcgctatttgatgacctacgcgatggctctgttttgttgcaggcatacgacaaggtcatccctggaagcgtgaactggagacatgtcaacaagccaccagcgtctggtggtgaactgatgcggttcaaggctgtagaaaataccaattattcgatcgagcttgggaaacataatggtttctctctcgtcggcgttcagggcgctgatatcactgatggccaacgaacactcactctcggattggtgtggcagctgatgcgccgtgatattaccaacacactctctgcgctagcccagcgcctgggcaaacgtgaaataaccgatactgagatgatccgctgggccaatgacatgtctagcagtggcggcaagtcttccacaatacgcagcttcaaagacaaatctattggatctggaatcttcctccttgatgtactcaacggcatgaagagcagctatgtggattacgatctggtcacgcctggtcggaccgacgaagaggcatacgcaaacgctaagctttctatcagtatcgccaggaagatgggtgccaccatctggttggttcctgaggacatctgtcaagttcggtctcgtttggtcactacgtttattggtaagttaacactttcgtcggtatggcggaaatttaagtctctaacagatgataggttctcttatggctacccacgagaagatgtaaggaatacaacagctcactttgggcaatcgcaatttttatggcattgcataccttttactttgtttcctcaaatacatgtaaatatgtcgcttctcaaggccaacctaaccaagtgtggatctcaattgaagttttattgttatcatgctagatatttccctctccgattgattaaaggtactgatcaaaccatgcaactgcctacaaaaaagtcagactgtttggcaaagcgaattgttagcttggtgatatctgcgcaaacagcaaattcgtgctcaacgccaccgaacaagttgatctggtacggctggccagtcttggccaggatatcctcagattcatggcactttggggccagaaaaattgagaaaatatttagtcccggcgctataaccggatcaagattgtcggccgtcccaggccgtcctttaaatcttttaatgatgctttacttagatatgaatgaattaatctaaaagataagcatgaccaaagctaccaaaaattccacgccgactccgactagtggtcataaaattgcaaatctcaagggtataatgccgctcaagtgacagaaacaatcagagattctatatgacagttgattcaacgaagttaataaaagaagtataagatccgcggctcgtacccgaaaccggatacaagccctacctgacctggtactccgtatagctggctggtatactgcgagaaacggggtggaaaggagtacagattttgacggcgtaaaacataacacaaaacagcacgaaggcagtataagcaccataatcttgagcaaagtcttgcaaacgaattcacccccgagttaattaccagctgcagcaatggacagcgggccttggattgcttgtaattcctctgcgtcgacgaaactagtgtgtgcgacacaggcaacatcgcagggacctggctggaacagtcgcacggcgtattttgtctatatttgtcaactcgggtagcagcaagatatacgaaacatcaacatactccgaagcaatagccgacagcatcgacccgatcgtagcccatgttggactgtgtttcccttggtatcccttgagccacacgttctacacggtctggcagatgacctagaaggcctattagccagccgaccagatcgaagctagcggggcgattgttcaacggctctgggtcaccgtggaataggtctggcatgacgcccagatggccatttgccgctaattggtttgcaatgagctgcgcgttaatgaagcggtgcggtgagcaacaggatggaacgcttgtggaacgcttggggtgtgaaatgtagacctcaactactaccatcagcgaaactgtagtctatttccagagaatcagaagtatggaaatgacgcaacaagcagccggtgaattagattccattaagatacaatcgaaatagcggtacgcgcgcgcgggagagtgtgcgtacaagaagaatatcaggaagaggaagagtacagagaaagatacatatatatcagggtgggatatagagtccgtgcccgtccaatcggaggcggtataaaaaccatgtagtaatcaatatgtaggcgcaatctatagttatatggatttgttgtttacattgaagcagtaaccatcaacggatattcaggtactgtatcaaatcaaatgatcaagtacaagctgcataacagacttggccctgtaaagatacccagccaaaagaggacattgcccaataaacggcgacctctcatcaggcgagtccggcttagcgcaacaagtggtagctgagacatctggaggattagtaggtaacctcggagccgccggaatatgcacagcatgagaagctcatgtacacatgcagataagagaaaagtgatgagactggcagatacccgcgacaaacggtattcgctgatggagccatggtatacatgccgaaataaaaagttatggacaggacggttccaatctcgcgcgaactgatcccacgagaccgagttccaccaatcggaatagaaccctcgatctgcaaacatggtgatctcggccacagcattaagctagatgaacttagcaataaatcaaggtagcaaacagtcaaagagacttacaacacattcccagatcacgtagaatgccagtagatactccatcatgaacggaaaaagcaagtcaccgagaacccaggggaattcccgaagtctctgctgcgcggtcattccctccgctttcatacgcacggtgtccatcaccaccgggtatatccacgattgagagactgcaatcataactacaataacgccgaatgtggcgagggttttctctgcgacatagagccaatcaattttgttggtccgcgggtattcgagctcataaaccaatgtgggcaatgccatgaagtcgcagatatttcttattgtcaagttttgaggatagtgattgttggttagggagcaccggccctttaatccctcagataagaccttgatctcctgctcgagcagttctctgagcgatttcacctggttaggttcaagtggcacaccggtctctatcgttctaataagagataaaagctggtcggtttcatgagatcgagaatagttctgtaggtcagaagagcgttgactaaagtcttttctcttgaggtctatgatctcagcattgacttgtgtatcaattgcagaagagtggcccgtcttggtagaagtagcatgtcctctttctttggctttggtttggccaagacttgctttcagcatatctcgtttgcgatacatttccgatactgccctcattagctcctgctcacaaccggacacaaattgacatacaatagccattgtaagctgcatagctgtgttgcttcatcagcatagccaagcagtgtaatacgataaagaccgtgtgtgtccacggccaatcgcgatggtatgtccaccatataacgactccaaggtatgtagtttgccagatctgcacaggtcagcaatgtaacagcgtcaagggcagattttaagactgacattctgaataagccagccgagaccgttccagcgaatgtatcccctgagtatcactcgttgtagtatcagacaaaaccccgtagaccaacaaaggagcaagtcagtcagtccaaggaccatgacatctttatccatcataagatggataatctcattcttgccccatatgctgccgtaagttctccaattgttggcagcaagcctgaacaacatcaaggtcacccccatccagaagagaacaaaaaatccatggaactggggggcagtggttcccaaattttgaaaagtactcagttgtcgggtaaatttcaggtcttggaacctgaatttccgtttctcacccgactgatgtgagagattgtgcttgagaatctcctgtaaaagctcggcatcctctgcggtgagcaagtattggccagcttgctcagtctcggtcgatgctggttcttccaagtccatgattatgcatcatatactccgtagatagtttcaaatctcaggtcttagagaatggcggcctctgtttttctttccccttagcgcggcaaatgcggcaaatgcgataactgcgtcaaatgacgttctgtcgagatgtggttcctagattggagtatccagggaagaggaaaattatattcgaaagcaaaataaaagtaacaaggaaggtcgggtatcaagtcgaaagagtagacattcatgcaattatatagctgagcttctatcgacttgtcatgcttctccgccttagctctacccctggagttgtttggtctctctcttcttcttattaccattccttaccatgttaccatccattggcccttattcaattgaatcatggataaatcacaaacgccccaagttcgtgtccctggcgaaacccccgaatcaacccaacccgaacccaatgcgactgcgaaccacaattccaccgaggtagagatgggagaaacacaggacacaagccaacctgaacccgaacatgtgcaagaagattcgacactttcagatgtgcaggcagagccagaactacctgctccggcaaaaaagaacgcgggctgcaacttccttgagtgagcattcttttcctaaacatttgcgacacaattactttttcaagatggcatcacctttcattgtcccaatcattactcgccagctcacaacaacttgcagcttcctgacttcacctatcgttgagattatcgttgggaaaggcgacgatgagaccgttatgacagctcatcaatccctcttgatggaagcgccactactagccgagttgcttagaaaattcgaagcgtcaggcccggtgggttctttagtcaaaatccgttccaggtatattttcatatttattatactaattggttatgatcaatagcgacgcatcaacctgtcagaagaggacgttgatgccttcggttgcttcctccagttccaatatacgcgtgattacaccgtggttcaaacggaaacacccggggaaacagttgaagacaaaagcggcgacgagttgctgcgccatgcgcgcatctacacactggcagagaagctaggtctgccaaaacttcagcgcattgcccatggcaagatccataaggtccagagctcacctgatgcggagctttcatatgcccgttacgtatatactcatacaccagcaacagacacgaccattcggaagcctgtggcgacttactgggcgagccaaagccacttgctgcggcaggaggttggggacaactttaagaagctgtgcattgaagtgccggagttttcctttgatgttttgactatcattctggatcgcaagttgaagaacggatcggtggatgagatcaagggaagtgcgcgcaagcgcagaagagacatctagttattgccagttgtacaatcacatatccgaggatcaacgaagtctttttattaatttggtatgaaccttcttgaacagttcaggggcaaatcttgtcaatggccgtagggcctgctttttataaggccaggctctccacctcctcaatgagtttcggggccgtggtcagattctcagaaccgtccttggtgatgtggatgttgtcttcgatgcgcactcctcccacactccaataccgctctaagacctcggtatcgatgtacttaccggtctcgggggcctttaagacgggatcgataatgaagcgacagaaatagatctggtaaataataagtattgggggttgagtaagagggttctcatggggtgtcacttacaccgggctcaacggtgaccacagagccagcaggcaggttagcgcggacacgcaggtagcggaacatggtatccttgtcctcatagttggggttaccaccggtatcatgggtgtccattcccaggtagtgaccgaggccatgcgggaagaaggccacactgacacgcttgtcgaacaattcgtcctcggatccgcgcaggatacccagctttaataagccacggatagcaatgcgatgtgccagcgcgtgaacgtcatcccagcacacaccttccttgagcatcgcaatacattccgtctgcatctggaggacaatctcgtaaatctgacgggtctcgggcgcaaatcttccatttagaggaacaactcgcgtgatatcggcgcagtaagtttggtattcgccgccagcatcgatgagaacattattcttccggcgcttagtgatggggtcgaccaggtcaacatcgtttctgacatagtgaagagtagcacccccctcgcctccagcaacgatagggtggtaagactgctcgcgacacccattggcaatacaagcaccgataatggcagcctcaatctcgcgctcgttagtcgcggttttggaggcctgaatagcagcaatgtgcgctttggtcgagatatcgtttgcctttcgtaaaagcgcaacctcgtacgcatccttgatgacacgagtctcctcgatggcggtcttcaggctggtagtgtttgtttcagcgaagccatggaagcttattccctccgacacctgttcggcgattgcaaaaacagcagtttgtccattgtggtttgaggcgatcgacgccaaagtcgaattcatatcggttgtgaacagaacgcggtccacatcgtacaccttggcagcctcatcgagagacaggggaagaccggaccaaataaccgactctgggttgatcggtggaataaacagagtcaattcatctccgacggcatcgtataccacggcggcattgggcaaaagacatccagtgagatagaagaaaggacgacgttgcctagaccgggattagtgtcagtccagatcctacagaaatgctgcattacctgaatggcatatcctcatcgctatcctcgatcaatcgagttttttgagcctcgaggtagataactccggccccgccatgccgggcctgaagagactcagcgacacgaagagcatgggccttagccggatacttggcagcgagaatggtatccacggtagtcatgtcgagtgaatagtttaagtgatgaagaagaagaagagagatagagagagggagacaaagctgccagctgttatttacaagcagacgaggttacattgcggggcttagaaattatgcggctacttcagggctgccgctgtcaaagggaaaaggaaaaaaaagaccaacacattcacatccgtggagatcatacattatattattcggactcttcatccaatccctctaggactagctctctgaagcagatacatcttcaaactccatctcccattggtccacctccgcaaacttcttgactgccgcgcgcaactcatcgctcacgcaacgagtggcctctgattctgtggattcgaaatcagatatgtcagactcaggtggtgatgacagtggagaagatgatggggatgatagaagcgcttcgttttctttgttgacgccactcgcttgagaacgtgaatacgtagctggttgtttgggacacgatttgtccttaattttcttctctttaatctccttccgcttcggattgcgagcatcggctaatggtttgagcttgctttttcctgcccgtcgcccagataatctttgtgatggatagttcagctcgtcctcgtcgccagatgcggcatcatgctgatcatcactttcgtcactgtaattattggtggcacggagtctgtgccggcgacgtggtaaaagcttgtcttgtaggtttgctgtcgatagataactcggggctttggactttttcgtctgaacaggtcgcggtgtggagtcgccaggtgcaacggagcctgcaggactactggccggtggtaacatagtctggctcaatatttctggaaatctttgggattgtggcgtagcctcgactctttcaatctcagcctcctgatcttcaaattcctcgtcttcaggttcgacgtcctcattttcaggaagttcgtctccaataacatgtcgagagtcatcgtattgaaccggtgtcgcagttggagtatcttctactatatccacaggtgactgtggtatttgaatctcttgggtcatgcgcttgcgcttgcgcgacccgccggacgagagcggggatgcggccggtgacggggatgaatttccggttggcttgataagtagtgactttccccgagagagattgagtggtgtcgattcatcattggggctaagcccaccaaggaagtcatcatcatcaaggtcggaagagccatcgtcgtctgcttgcatcatttgcagaatgctttgctgtcgcggccgccgcctgaagttgctcagaaccgaattatcaaatccaggcgttccaggaacccgggagtttgtgtcacctttgcgtccagcgaatgatagcgtagaggaataaccgcgcgatcttgtagggggacgactgccggttccaggtcgactgccggtgcctggccggtcccccgtaggtgaagattcaatcgcttgttcatggcttttagtcaagggtgtttgactgcatggcgcctgtcgcagatccaaggccgaggcacgctcaggctgcacgggcgattgggcgacattggggtcaatttgctgcgttgagtcttctatcgcggtttttttgtgctgactctttcccactgtacgacttcgtttgggggctggacgaggcatagtcgaacaaattgatttgagccaacggagtatgtgatagagccaaaatggttgcgcagctacaaatgcgaaagaagatcgacgcgtttgtttgggcgcggtgcacgtggaccacatgtgacagcaaactcgatacatactatctagtatctagtactccgtaggtcaaacgtacaaagtactgacatatattacttgatatatatttcgtgcaaatgccgattatattctatatctactagcttacttgtgcttttattcgcttacatttttcctatccgatgtgctacggactcaccctcgtaccgagttgggccaactgttatacaagctcggaaaggctggaatacattgtcattggacgacctcgcatatatatcaatacctgtgccctgaattctccgggcaattattttggatatccctctccctctttatgtctatactcatctccaagtatggtctgatgcccgtcatgctgaccaacccctttgggtggaatgcgacgttaaatacaactagacacaatcccagctttgaaaaatgaatttgctcacagagaacgcgacgatagaccccatcggggactatgcagttagcgacatatccatcggcaagaaaaagcgctctaatgcagaagctgttgaatatccaagaagacggacaacaatagctgtaagcgcctctggcacatttgaccaaagcaggactcttcaacaactagtgtcagacatgccggctacgcaatacccgatgtagtggagttcgtgccaaatgtgttccgatttgaatgcggaatgtgtctatcgagaacctggtatcaaactcgacactggcggcaaactcatcctagatcatttggccagaattgagactttattacattcgaatttacaaaatcaagagccacatttagccccgtccgctacttccccggccaccagcaacgatacaaacctcggtagcgatgatccgtcaacgagaacgtcatccagaggcttaccagtccacagaagattatctgctgttgggctcagtccccgggtccgcctacctactcttcatcccctccatttgcctctaattcgggacttggtctctcgcctatgatccacagcatcttcttcaattggagtggcccgcgaactattgcggcttactccaagttcaggcttttattttgaaaatgcatctacatattctcaggcagttttcagctatggaaacgcttggtacgcctgcgtgaacccttagacgtggaatcgatattgtcaatcagctctcgcgcaaagatatcagaaaggacacatgagttgtcttgttcttctagttttggctctaggaagtgccagtcatagtcgcggtatcttgtttctgtcaccagatcgtgaaccgctgggacttccttattttgccgctgcgtggggcttcctactgtcggtcatgatacgaaatactgtggttgcggtgcagcgtcgtcattacctagtgtggctcctggaagcttggatcttactatccagcgtgagtatgaaattgtagttgttgtttggcagtccgaatcggatcccgactcggtggagagagctgagtgtgaaggtatactggaatgccttgttatttgaggacgaccttcttgcagaattagatctcgcccattcgggctttttcgactttggagaactcatggatttgcggggagttttcgaaagaagagaggatgatggagagggggaaggcgtggatcataacgagggcgaagaacgccaaatagccaggaattatcagggttcatcacgcccggtagactcttggctggctctcaagcgtgatggactctggtacttcctggaagagattgggctacaaaggctcctcaatcgcgtcagtcatatcatttatcggaaagacagtgcctacactctcgcctcattaggtccgattgtatccgagctcgactttcagctatctcgatggtatgaccgtcttcccgggcccgttcaattccctttggccctaaatcctctttccaattcggttcaaacggtgctggggcttcgctacaatgcatgccataccattatatattttccatatatcttagctgtgtttgagaatgaacaggctggagtgggtgttgccggtgatgtttggatgctatactccgtcaactagagccatataaccagccatcgagaaggccaccttccggtgccctgtcaatggtatcacagacgttactgataatgggtgccacgatttctcctaccttctctatcctgcaaccccctcccccccgtttcacagatagatgcgatcatggcaggcgtggtaaacgaaatacagaagtatgcacacctaaagatgccagccgagattatccgagatggaaagaaatgacgacaaatttgtcttcgatcggccaatatgtgcttctgaactgctgatgactgatggctgaaagatttactgctcaagaatgatagtgatctttgtatatatgaacgcgaacacagtatgatgcttgtaagtactgaaggattgtagtaaagtgtgatatgcattagagtaagtcgttagggctcgcaccgaggcaagaccaccaaaataaacagtttatatggacaagaaacaaacagcgttaaatacaatcccttctcatgacaattatgttcttaaatcatcaaatataaaatcatggtatctcaaaagacatggggagatcgaatatggacatcagaaatatcaaaaagaacgcagaaaaactccaggtttccagtggctcggaagagggaagagaggggnnnnnnnnnnnnnnnnnnnnnnnnnnnnnnnnnnnnnnnnnnnnnnnnnnnnnnnnnnnnnnnnnnnnnnnnnnnnnnnnnnnnnnnnnnnnnnnnnnnnnnnnnnnnnnnnnnnnnnnnnnnnnnnnnnnnnnnnnnnnnnnnnnnnnnnnnnnnnnnnnnnnnnnnnnnnnnnnnnnnnnnnnnnnnnnnnnnnnnnnnnnnnnnnnnnnnnnnnnnnnnnnnnnnnnnnnnnnnnnnnnnnnnnnnnnnnnnnnnnnnnnnnnnnnnnnnnnnnnnnnnnnnnnnnnnnnnnnnnnnnnnnnnnnnnnnnnnnnnnnnnnnnnnnnnnnnnnnnnnnnnnnnnnnnnnnnnnnnnnnnnnnnnnnnnnnnnnnnngggggggggggggggggggggggggggggggggggggggggggggggggggggtattatcgtatagcttcacatatatcctaaaccaacacccactcgctacctcgcttgatgaacttgtcgagcatcaagcccacatcagccagtgcgaaccgacaaatataaaagccaaagaattctgcagcgtgtcgtgtgcagagttccaggccaacatgggttttggacgaatgtttgagtccagggtcctcaacttgctgagcaatttgttctggtaatgaattagaatgatgtcaaaacatatagacgagaaaggtattacctagcacttgtgcagcatcgaaaagccgcgccaacgcgcccatgtagttcgcgttggggccagaaaattcaagctgggtgacatttcgcttcgcaggtgttccatgtacagatgtcattgggacagaattgaggactagattgtccttgctactttctcgagcactcgggaccggggtggttgtcccaagcccggaagtttttgcgcgtaatcttttccatgtcaaataggacttattcggcgcaacttccggtgggacgggttcgtccggtgtggaagcgggcttgaacaatggcattgatgcttgaataccaacatcactgcccaatttcttagtcaaggtaacctgaacttggtcaagtatagtatcaaacgactgcatctcctccaaaaccgcatctgcatcatatgtatcgacctgggccaatttgagcagggcggcggtcagaagatcgcagttggacactttctcttcgagggcctttaatttaacattcttcacgcgccagacatctcgaggaataaagagcttctctgacagatatccaccgtgaggatgtgcgagtgtctggtagagacacctcattagccaaaatggacggagaaggaaacactccggacatggctctagaggaagcggggcattggctaccaacgaatttggacgaccaagagctgtgggtgagtgaatgttactaccaaatagatttaatccgccacttggcagtccattttggttgaagttgaagttagctagggtcggtgtgggtaaaacagggacgccgctagtggcgcccctttgggtgtcggggaatgcaccgctccacggggagcttggggattccgggcacatatcagggatctgaatcggaacagaggcattccgagctcggaaaggctttgtattggagtggagtttattcaatccatctggagccgagggtactttgcccatgggccgtgctgacagcggcaggggtggcagttcgttctcaccatcttcatgagtacgagatttggagaggttgacgtggtccgtgaaagaacccaccgacggattgcgttgtgttggatgcaaagtggaacgggccccaggaacagaaagttcgtctttcggcaacggtagcgggcgatttgccagtggggttgcaacattttcaaaagccgatgatgcattggaattcgcgcgagaggagcgggtattgatttcgattttaagctcgcgagtctgactggatagtctccgggctcgcactcctggacctgtagaagaggcgagtgagccgatagaaccctcacggtttgataccgaggtccgctttgagggagctggaaagtcggatgatgctggcaggggcggcaaagccgaagaaggaggagaagagggcatggtatatggttcgggccttaggtcgcctagcggcaagacatcgtcttctgccagcgtagacagcacattcccagtgcttgcggagctttcccatgtcctcccagacatgttgctagaatccgattctcgaggaagtgccgacttggactgaatgccaaactcaaagtcatccatcacgtagcccttggtcatctcttctagcaaccgctcctcttcctctgcttcatcgtccagatattccgaagtacgggaaatggggtcatcccacaaagtcgtctgttcctggatgcggcgcatttcacgatcacgattcattgcctctgcttcctgttctgcctcgcgcactctttgcttcgctaattgaatgttcctgcgagcatttgacacaatatcatcacgttcctcttctctatgctctagcaccggctccagaccttcatcatatgcagcttccacggccgcatcgagtgccgcatcaaactcagcttcggtgtcattactgagtcgacggcttgtccggcgacgaaggtacaccgatgacgccttagaattcgccgatgagggtgacgaaccgcccgattcatcaattgtgtccaaccatgaagtggattcattgatgtcctcctgactacccgtcggcaatgtgatagatcggtgttgatcttccaaggcagacggcttcaaggattgtcgccgagggggaatcgcttccatagaaaatccttttgcctcttccagtgggatctgatggagcctaaagctggaacgaggcgagttctgctggctctccatatggaatccgtcatttgtcgaacgaagcaattccccatatgactcttggctgaggggccgatctggaagagctttatcgtcgtcttccgggagaggaaagtccatacgatgaagttctgtgacccggagcatatatgtgtctcggatttcttgaagtttgagtttctcttcgtctcctccattgctacggaccatgacaagctgcagcaagttgcacgcgtcggtgtaagcttccattgcaccctcaaaattagcagcgttgtcaagaagaacggccgtatttgctttctgaagtgcctttgacagcatcaccttttgggtctgtccatgttgtatggccacggcgtccccgtccccgtcatttaaagaaatagatcctccactagatcgagaagttggcatatctggtttagtgctatgtgttgagggctgaaaaagatggcttgaggccgcaaatgagagatcgagttgttgtgatgtcgggtcatggttgaatatggcagacttctccatctccggcaaatcgaacatcggcaacccattcagtgctggcgcacgttgcgggctgtcgctctcccgtccacggttataacctgacatggacattttcgagctccctcgacgatgatgaccgatgtactccgagggacttttgctagatgctgttgactgggaccagcgatttaagctgcctagcccttctttgatagggctggtggctccgaaaccctccggggacatgtttgccacattctctgtaagtacaccgaggccagtgggtgtgaccgcacctggcggctttaccattcgagtccgagaactagatcgtgacgagcgagaggaaggatggttatgggacggtccagacagcggttccgatggaaagggacccgaaggacgtctgaggtaggatggattggggtcatcatcgactgctgtgtggtgaatcattttcgcaagacggtggaatagcggtcgaagtttatcgaatgatttagatgtcggaaatgggatatatcaagtctctctgaaattgtgtagccccgaggcactacgcgcgaccagacaagcacaatatgagagagaaatgggtatatgcaaccgggccctgtgtgtcttcgctcattcttcgcaagtttaaagtgttgatgtggtcgtgtctcgtagagtatgtatccttgcttttgaaaaccccctctccgtctcaatacatagcttcgtaattggaagggctcgaggagtttaaagcagtaggctgaaagacattatttcaattgacctggaacggatcaggaaccatgcgcattgaagatcaggaaccaaactcacaaatcggggaattttcttgcgtcaatcacactcgcaaaatgcgcctcagagcaacaagaatctgtcaaatccgcagaagggcagactaacagttgccacttgtgggggttcgtcaagttcgtcagggaaggggggggggcttgaactacttcagggggggggttcccgggtgccgggcggtggacgaatgagaaaaagcgatgcggggacctcggaaggatacgatgagttctgggagattagaagaagaaatagagaggaataatggatattgaattctggagtctggagtctggactcccaagggagagggaaaaaaggggacacttctccctagcgcaggctatatacatacagggataagctaggttattgtgcataatacagagtagaactaagaaaatatttcaaagttgaaagttggaacgactcgataggtagaaagctaacagacatctaaatacataaatatctaagacaagtgtaaacgcaaatataacccaaatcacgaagttgacgcttagcgacgggaaatggggggaaatggggaaatgagacagatgagaggggagaatttcctccctccaaaaaaacctcatgaatcccaccttgggtcgttctttgactcggaacttgaatcctttccatttagtccgttctataaaagtacaattcacctcaattcgaactatggctactatcaatcctccgcgggatccgaataccgtgagcaactacaacaattggcgttccacccatattacggccaatttcgatattctgttcgatcagaagaagctggtgggaaatgtcgtctatcaattcaagtcaatcaccgatggcgagtcccaggagatcatcctggataccagccatctcgacattggcgcggtgaaggtggatggccagctatccaagtgggagtttcttccccggctagagccctatggtgtgccattgaagattcgccttgatacgcccgtcaagttaaatggtaccgttgaggttgatgtatgtttcataatcattatcctcatgaatctctatctcattcaaatcatagatcgaggtgaaaaccaccgacaagtgcaccgcgttgcagtggctgacacctgcgcaaacttcaaacaagaaacatccatacatgtgtatgtgacaatcttgaactcttcttggagctccattagctgacaaacttgcctagtctcccaatgccaggcaattcacgcgcggtctatcttcccttgtcaggacactccggatgtcaaagccacctttgacttcaacatcacctccccgctcccggtcatcaccagcggcctgccgattcgcaaggagtcaatggagtcaaaggcggaccgccaattgtatcgattcaaccagtcggtgccaatccccagctacctctttgctatcgctagtgggtaaggattcttccaccattctcagaggtacggttcattaatgcagaactccacagtgatgttgtcgaggctccaattgggcctcggagtgtcgttgcaaccagccctgacaagctggaagagtgcaaatgggaactcgaggctgataccgagaacttcatcaaaacaatcgaggtacacagccgatattctattcatatcaatgttcaattctgacattgcacagaaaatcgtctacccttatgcctggggtgaatacaacgttttgatcctgccgcccagtttcccatatggcggcatggagaacccgatcttcactttcgcaaccccgagtatcatctcaaaggtacgtagtatcctctacgcaatagttagatggaccatgattaatagctccctcaggaccgtgagaacatcgatgtcattgcacacgaattggctcacagctggagtggtaacctggttactaatgcctcatgggagcacttttggttgaatgaaggctggacggtttaccttgagagaaggattctggctgcccttcatggcgaagcctaccgccacttttcggccatcattgggtggaagtctctgactgacgctgtcgagcattttggtgacgatcatgagttcacgaagctcatcgttgatctgaagggcaaagatcccgacgacgcattctcaagtgttccctatgagaaggggttcaacttcttatttcaccttgagaatattgttggcaagtcaaaatttgacaagtttattccccacgtacgcaatctctcttctctcgttctgtttcttttattaaccctttcttttgcagtatttcacaacctttaagtgcaaatcactcgactcttatgagttcaaggcactgattctggacttcttcaagtcagatgccgaggcttccaaggtcttgaacgaattggattgggacaagtggttctatgcgccaggtttaccacccaagccaagctttgacacatcgatggtggatgttgtttacgaactttccaagaaatggcagtcccttcccgactcttccttcaagcctcatattagcgatatccagggcttgaccgcaaaccaattggtcgtcttcttagagcagattctcttgctagagagaccactcagccctgaagtctcgaagttgatgggtgatgtctacggtttgaccgagagcagtaatattgaagtttcgcacctctactgccaagttggcatgaaagcaggagacgacagtgttattgagccgacaaccgacttgctgggccgcgttggacggatgaagtttgtgcgacctttgtaagatgtccccgtgttaatcgcagattctgttcttgatactgacttagcattttttcttgttctttaggtaccgcaatctccagaagatcaatcgccctgtcgccctcgcaacattcgagaagaacaaggatttttatcatcctatatgccgagggatggtggagaaggatctgtttggcaagaaagacaactaggtctttttctctatgtcgtgttttactcgaataggtagacatgaatgctcatcggtttgtgtgccgtggtctttggatagtaaaaattgttatacaacaagactagggcaattaaatattgtacatgtctttgtaatcaaatgatataagatagcagaacggataccacaaatgcaaactactcacttctgcgaggatattccatcatttgtttgcttgaacgagtttcttgtccgtctccgagtacgcaaagatgccggtgttcttttggtcacgcccaagagagaaaacaatatccacctcgtccttcttggacagctctgacaagactcggcgcatgtaggccaccacctgcgcaaccttggcccagtcaatttcttctttcccatccggtccggtctgacttcccttccagaggtttctccagacagcagcgcccagcaccgcatcgcctttggccagcccttcatcatatgcagcaatgattccacgccattgaatgaacagatccttcaggtacttgttgcgaatagtgcgactacccagatcatgatatgtgtccatgcggtgttccgcttcatgcgaaaagtgatcgatcaagtggcgggagtaggtagtaacactatcgcgatggggcagggcacgaaggcgaaccgttaagaggtacatgtggaggaaagtcacctgggaccaggtagaaaaggttggcaagaggccgagctctacagcgacgcccgagattagcttattgtcttcaaagcagatcatcgcctaagccagagaccgctcgtatcgtctcacctttataccaccaaccctctccaacaccaagatcttcaccggcttctgttttcgggacctccactcccttttgcgacgcttggggaattttgtaatccgcttggctggaacaggcctcgaatagcttctgtgtcatgccatacgcaacataagtctcggcggcatttccaggtctccgggaaaagttcttggccaagtcggagaccttgccttgcgaatatgatcgagtgatgatcgatttcaatggctgttccgtagacacgcgggaggcggagaccagtgttatcgggctgcgactagcagatctggaaaggcagaggttctggaacccacgaatctcgcgcgcccatagtgttgatactctcttggataacattgctgaggatgtggaattcgtgaattggtctttcgtgattggtgatctggatctttttctgataaagtatgtttgcattgtttgttccgatatcaagacaggaatttaaccttacagtcatgtttcattagtatttaaaccccagtacatcggaaggcctaggacccacttattttcggccggtaggaaacttcacattcaaaaccccttttaggtatacaggtaactagtaactagtatgccacccttcgtacctgatcacctcttctacacggtgtggcatagttactaacttctacgcgtagcgcgcgcgtactggcggggtgtatactagtaggaataggtaggcggtgtaaaaaagcggttagtggtcgaagtaccggggtttaaatattaatgaaacgccactgtagacctccagggttgcgtatctcctaagagagctagttaggtactgctgaatttgattgtatttttacccttgtatgttctcggtggagctcctgctggttattcaattgatggtttagtgctagtatctaacttgagctcttctcactagttaacgtaattcccaagcgagctgcgcagcccaaaatacatagtaaaagcgataaattacaacatgatatctcagcaatgatggtccttaggaacttgtctttatagcatagtactatatatatgatatatagcatgtctagggagctttaggaaaatttatggctttataactgcgatatatatatttctagcttttgggaacgtaattttcggtaatatttgaaatgacagtaagatagtattctactctccttgagattgatatatagtactacagtaatatgtcttatcaataatcatcgacaaatgggggaataggataaacatatggttgttgagatataaatgtagaatgtgtcgcatttactaaatgttctaagctgcgcagctcgcttggaaattacgttagttagttactaatggttaactatgtaatttatcacttgtattcttgtgccagcggcagagtatgcccaagattgcaatatgcgtaagtatctcggagcccctcggttagtgttgcgtgttttttttgcacccttcgttccgcctttcaggacaagagaggttcacggtctacgggtaggtaggtaggatgcgataggtctagtgacatagtaatagggacatatttattacgaagatagttaaggacgctcttatctctccttatcctattataatctgcatcgtttgtatatgtctcgtgaatttaatcattaaatgtggcagtaggtccgtaacctaactagccaagtctaacaaaagactcatgtgggcgaatatgggatatttcattcccaatgctcatgcgtatggtcgtcatgatccagtggcatgtttcgtttgtgggagacgattagttgctaaatggcgaacatcccatgaccgtgacgtctgtatccaagcccaatggttgactgggccccgcggataaccagaatatgaagtgtagatctctcaatcgcctagcaccaaccgctcggatcgcttttctacaagggggagaatctcagagagccggttgggatctctcaagaaagctggaatatcatctctggttgctgctagcatctgtggacgactgtcagatcaaacacacatccaacgttatccaacggccacacatacctgtcgaactttctcatattcacattcctttgagagatattctcgaataacttcacctgtggcaaagtccacataaactcgagtgtcccggagtcggatcaaaacgtgatcaagcctcatgaagaatcttgtcaatagaagaagtcttcctggcatgactcggatcttgcaagacagcatggtaatcccattgtccgccagctcatcttcataaagaacaacctcgtcaaaaaagaggatgggatctggacgcttcaatagttcaatcggaatgggcttcgtcgttggctcaaacggccgcgcattgggatggagggtgcccttgtagtcggtgctatatgaccagtcgaacggcttcacgacttctttaatcccttcgtgtgttttctctctgcggaacaagccattagtcgcaacgatcgataagcagaaatttagacggctgcaaaaatacctgctcttttgccattctcccgagtacgcgacctggagcatggattgaccagtcttgtccaccaagtccaaggcatcaaacgcattgaaattgatgccccaattaccattctcgtgctctattgcaacataattatcaccaaagatcatttctgggggtgcaatgccgagtttctgggtcatttcctcgatcgggtcggctttgagaataggtagcttctgtgttgaaattcgaaacccgttgatggtgatcgaatttggtttctttgcctccggagagaccgtgacacatgctgtcgtcattgctaaatcttcacaagaagcagcgagagatcaaaaacagctgagccagtttgcagtgctgatggcgataaccccgcggacggagaaagaggcggtccgaccctgcaataatatttgttcggcagaatcttgaaagctttgatttggtcaatgggtctgccattttcaagtctttcataggtagtatcccactgcattcagaatgctgtatttgaataaaaccctgacatggttgtcgtcacctcaagctgcaaaataaagatactcttcgagcatacgattggtacggaaatatgtgtaggcgccgagagcggacaggatggcggtgtgatagccctgtacgtatattacatcagccgggcgttgctggggtgacacgttctgggaatcgcccaaacacccgagcttctgtttctccattttgcgatatcctccatccaccaacgactgacttcgtgcaaagtgatcatgattgctctgaactaagcctaaactcaattttggctacttattatacaaccctctttttcccatctcttattttcacctctcctatccaccctcccaccctctcaccatggcaacgaccaagacgctcgaagctcgctttgagcatctgtccatgaaagacgagaaagagaatggaaatagtgatcgaagctatggcaagcagaaggtacttggctcaacgcaatctggttggagatccaccttgctgatctgatttaccaaggtcccggtttcttcagcccagtcaaacagcaattcaaaccgagctcagctactgaaattggctcttcaaaataataatgaaaacaaggcgaatgccatgaacgttgcagcctcgccaggcaagggatctcacggcgcattggtgacccggagcaccgatgaaaacggcgaccagcgcagatcttcttccctctgcgagcagccaactgtggccaaggagctgcacttgggaatgtttgaaattggtaaaccactaggcaagggcaagtttggacgagtttatcttgctaaagaacgttcctctggcttcgtctgtgcactgaaggtgctacacaagtctgagttacaacagggtggtgtccagaagcaagtcagacgtgaaatcgaaattcagagtaacctgcgtcaccctaatgtcttgaggctctatggtcacttccatgacagcaaacgaatcttcttgatcctcgagtttgctggccgtggtgagctatataagcaccttcgcaaggagcatcggttcccggagtggaaggccgcacaatatattgcacagatggctgcagctttgaaatacctacacaaaaagcacatcatgcaccgcgatattaagcctgagaacatccttgttggcattcacggggaaattaaaatcagtgatttcggctggagtgttcatgcccccaacaaccgacgccaaacgatgtgtggaactctcgactacttgcccccggaaatggttaatcctggctccaaggacaactactacagcgagaaagtggatttgtggagtctgggcgtcttgacttatgagtttttggtcggcgaggctccattcgaggatactcctatcatgacccatcggcgtattggcagggcagatatgtcggttccctccttcgtgagcccagaggcaaaggaccttatcaaaagggttggtatatctttctccattatctatggcccgcatactcacatattatctagcttcttgttcttgatcccgcgaagcgaatcccgctcgaggagatccagcgccatccttggatcctcaagcactgtgtcaaagacaatcgagctgtgaagcggagttctgcttcttccaaggagggcaaagcatgaaacctgactttgacctttacatggtagactttgggggttctagtttctttttgatatttcctcatgtggagttttggtgtctgagcctcatgcattttcaaggcgtgttagattgtcttggagtccagctgaagaggtactctcgatatggcgatattttgatcttaattttattctccgacgtgttcaatacaacatggcacattcaaacaattccacaagaagccacggatacctatgctctctgagatatttgcatctataaccaggacggaggacggagaatactatcggactggatctgtagttgtgttcttagacttcattgacaatcaccatcatagaccaggtatattttgatctcatctcacctttagtgctctcaatcacatgatacatacataaccttacatattttaacaagtaacaaatccgaaaagaaccccggtagatgggcgggaaggtttgtgtcgctagtgaaactcatgaaatatagtacatccagacaatatctatcatacaaagggcgagaatagtacaacgctgcataggctgcgtggtatcatcgatagatctcatcaaatgggcgtgtgtctctgaaacaactatcccaaacttcattgacgacccttgtggcatgggcttcgtctttacaagttgggcgtgctcgcacagagagaatggctctccgtcggacgcattcttggtgctgttgtgtaagcttccactgacctcttcggaaaaattcgcgcgcccatctgcattcgccgctgagcgaactagctcgaatctaaacggatttagcgaatctcggcaatttaagaagggttaagaagacaagaatgacacatacctcggtacaagcggcatgccgaagattatcagaccaattcaccttgaacctgaggtgatcaaaggcatgaaccatctcatgggccatggtatcttcgaggtgtccctggtccttcatttcatttgcgcagatcaggattccatattccggatcgaagccaccacccttccgatcagtgcaacgacgacagtagatgttatgattgtcaagatcgcctcctaattgttgaatgctttcgctgagaaatcgaatcgtagggccttaataaatcgaccatgtcagtatccagctagataactcttagacaagggactcactatattgaagaaggtaatcccgctgatcctcacagcgcttgcagtctgcttcttcattgcgagtgtctcgcgcaacacggaactgctcgattgcttcgttggacatcttgcccgtgagaatcgaatagatattgcggaattgggtccaggtgtcatcaccgggaagaaaccctgtagtttccggctttccattggaaggtgcagccgcacctggcgactgggagtctgtcattttcgatcgtggacttgtggagagtcacccatcactccgcgcgataaatcgagatcctccgcaaatggcggtagtgtacggcagaatcagcaccggaatctggcaaaatgggctcttccgtgattcatcaccgcggggcccacaacacaaccggcctttccaattcttttcgtttgtttcttatttgtttatttgttactgggggttttattggaactggaatttgcgctatggtgacctcatccagcctcacaatcgtgatcaaattgggtgcggggatctatatctgttgtccgatgactcaagtactgaccactcgatatatcaggaacgagttcgattgttgacgagaaaacccacgagcccatactttcgatcttgacattgatcgtcgaaacggtgaccaagctacacagagatggccaccgggttgtccttgtatcatctggtgccgtgggggttggtctgcgaaggatgaatgtagacaaaagaccaacatatcttccacgcatacaagtatgtcttcgattctacaggaatacaagcccatataatatgtctaatggaaaagttgctaatgaaatctgtaggctctcgctgcagttggccaatgtcgattgatgagtctttgggataatctattctcgcatcttcgtgtccctgtggctcagattctgttgacaagaaatgatattgctgatgtatgtacccttatacctgcctagccctgttcctccactgacactcattacagagaacccaatatgtcaatgcgcaaaatacattcggacagttgtttgatatgggagtgattcctattgtcaatgaaaatgataccctggctgtttctgtaagtaagttccccttcgagtcgcgatctcgcatctgacccaatcatttccaggaaatcaaatttggcgacaacgataccctttctgcaattactgcggcaatgatcaaggccgactatctgtttttaatgaccgatgtcgactgtctttattcagccaaccctcgaaccaacccagatgcaaaacccatcgaggtggtgaccaatatatcctctctcgaggctgacgtctcatcagcaggctcctctctcggcactggaggtatgagcacgaagattgtggctgcaaagcttggaaccagtgctggcgtcactacagttatcaccaagagctcaaaaccaggcaacgttcatgatattgtgaaatatctacaatacctcgaggctcggtcaaatggcgtagcagctgacgaccaaagtgaggcacccactgcccctctacatacccgattcatccgttcagataccccgattcaatcacggacattctggctacttcatggactgtacccacatggtacattatacatcgaccacggagcttaccacgcactcttgaataatgccaatcttctcccggctggagtcgtcggggttgaaggccattttggacagcaagaatctgtgcggctagtggttgttgatcggccatccccagatgccttgaatggcgattttatccatcacagagaggaacctaaggaagtcggtcgcgctctggttaactacggaagtattgaaatcacacacattaagggccaccgcagcacacagattgagacgctacttggctatgccgatagcgactgtgtggcaatgcgagagaacatctcgttccaccccgaggaccacaaacataccgtaacaccgtcactaacaccggccttggaggaatggaagtccccggaggcataatgttggcccatccggtacatgcatatcatgaacagaagcgagaatcttcttgcattcaaaggcattgatggtcgatattcccagtcaaacctgatcgtttcaatataaaagttactcgggatatataggccgacaatttgaaagcccccaaagcatgaaatgacctccaaaacagcatgaatgaaagcacttgaaaattgaatgtttatacgtcaattcaagtgccatgtaaagatatgagaaaacaaaaatgtcaagatgcctgaaagcctatcaatcattccaacggtccaaccacttctgcattctcttgtccaatgtgggcgcaggagcgggcgcagcctgaacacaaacggaggattagctttcaaacccaatcgacaacaagcaagaatcaaactcaccgtgttctcgatggtgttcgccgtccatgtcgcaaaagctgtatccgtgtactggatggttggcgcacctaagtagctggttgcaatagagaacgggaaaggcgggtattgaggagtggctgatctggtggcgacagtagtcccagcgctcttaggcatcggggcatatttgatcgagccagtctgttcaccgtatgggacggtatgctggtcaactacagaaacatcgccaacgccgccgacagcagccacttgtcgtttgcgcaattcattgtgctcggcttcgcccttggcggttgaggttgggaactgcaaggtggcttcggttgaggaactcttggcgagactagaggagttgcaaattgaagtgagatctgcggcctcgatgaggtggtcatcgtctttgactgtaggccaggaaataacgacggcgggaatcggctgcatcgtcttgatcgcatttgttactttggtcgagaatgtacctttcatgttggtcaaagtgaaatgagaggtgaacccggaccagtagttatgagggcctgataggactatcttgagaaagctgattgggccccagggacattggtcagtcacaaagcgaattgatgaagccgccgatgtcagaggcaaatgaattgtcttactatgcattgggttcattcccaccgacactttgatcgacacgaaatgacaccatgtcaccaggagcataggcgccattgttgataacttgcgatagagtgtcctagatgtgtggttagctctatgttttgcagttccgtatagagagaaacatacatatgaacctgttgtctcatcaccggcacagagataaaaattataagttgaagttggttcgccatctaagccccaaagcagactcacgacagctgcaccgtcgaaactcagatcatatgttgtgatctgagaactgatctggccatagacggccgtgaataacagggcgacctgaagtaattggactctcatggctgatatgattgagaagcacaagtctcgaaagaacagagagttgtctcccagtcaagagagagggaaatcaccccttcatagggtggtctggtatgtgcatcattcctaaggcccttgagccctcgagggtttgttttctatagacccgtgatgtgcactaagataagtggatgggtccgtgctatcgggcttctcctgtcaaggtgtcagcccacaacttttgacaacttccaaacttataaccgacaggatgtcgtctcaagcaaattggaactcggtgactggcatagctacactattgttcgatggcaaccttgtcgccattgctatcgctgtcctattcacctttggtgtcccgatcgcactgcatatcttcttcttccagaccgtagcttctccgccctcgagtaatttcctactcctaggccccagtggagctggtaaaactgcttttacgaccttggtaggttgcagtctatgacctgagagtggctaagttctcgctaaccaatctatagctcgaggccaagtcctcgcttgcttcaaacaagtcacacagcacccacacctcccaagaatcaaccttagtaaccgtgaccttaccaccgactgtcccaactggatccaaccgctaccgatcagtgaacgatccctccttgaaggaggccgtccggaatccaatcaagtaccgcataagggatacccctggccatggcaagctccgcgtatcgcaaggaatctccgagctccagaccatgtcccggtcaaaggatatcaagacaaggctacgcggtgtggtgttcatggtcgataccgctgctctagttgacgaagtaacgctccgtgataccgcaacctatcttcacgacgttctcctctttctccagaagcgcgcaaagaacggatcatctagcaagcgaaccactgatgtccctgtcttagtcgccgcgaacaagcaggatctattcactgcattgccgccgggcgcagtgagggaaaagctggaagcggagattgatcgcatccgcacgtcgaagactaagggtcttctggatgcaagtgcggatactgggttggaagatgaagaggaagaaattttgggtaatgatgaacaggagactttcagcttcaagcttctggagcacgaggtcggtgtcaaggttgacgtggttggtggtgctgtcaagggtgactcacaagaagagttcggatctggagtgcgccgctgggaggagtgggttggtatgtgcttgtgagcgagatgactttttgctttcttgtcttgatggtccggaatagtaaatatgtggtcctatcatagtttacttgtatatgttatgccagaaaagaaaagttgcactgagaagattctagactacaatgtgctttttccattgatattgctaatctaatcctagtgtctcggtagcttgggcatcaatccaatcctgtatggtcaatgatataatataacggcgtgaagtaaacatagcactcacccacaaatctcgagcaagtttcatatttccagatatcgcgctgggctcacactgcgtggcgataggcataaaataccgaccgcgatgattttgctcctgcacctctcgactagtcgcaagatataagcccgtggcagcaccatcctccagactttgacccagccacgatcctgccgttcttataagccaacccaggaatctcccaaaataaaactcgcacccgagctattgatcagtgacgatattgcccggaaagaacgaattgacatagatctgctggctcgctagatcttgatcctcctgaagtcgccgactgagctctttggcaaagaggatattacccaactttgatcggccataccgccatactccatcgtacaaggcgggccacttgacgcgtgacgatgagaatagaagatccagatcgagcttctggcaccaacaatggaacgatgagctggtcacgacaattcgtacgtcgttgctaggcgtcacgctgttcttcaacagtggtaggagtaatgtggctaggacttggtgtccggcgcagtttgtcgcgaatacacgctcgatattctaagatgaacgcttgttatcattttgaacactgatggcttcatttaagggaggtaggtcaatatgtaatgattcagtcgagatggagagatagagagagaagtcacctgcattgcaaatcagtatatgaatccgatctgtgacttgttttatcttctcaatcgcggccttgacatcctgaatatcgcccagatcacatttgacaaatcattctccagggagaggcctttgcggtgcctccattccccacgagcagtgatatatctgtcttcacttctggcaacgatgattactttctctatctcgtgcaagagaagctgagttgtgatctctgtattctcgttattataccctacaggatattcaactggctagaggtcaaggaatctgcttaccttttccaatgcccgcttggccaccctggggaacttggttgctgggctgagatataacgagaggactcactgtcactacagccacccgtccatttaacggcgttatgtcttccagggagaagttccgataagtaaatattactgtcatctttggggggtggaatcgacaaagtcgagaggatccccagatgaagtcgcacatacatctctgatctgaaccgacgtcatcgccacctaaaccgaacagacttgaaaaagaaccatgtgtatattctctatggcgtgcattaagtattgatcacattaaacgccagtctctgcgctgcacggtctaggtatttcaatcccacaatgtgttgaatcccattggggagccttcatgccaacgcaacagaaacgcctgttcccagatatcaatgttcaggaatgttgaacccctacccaacaagcaatgtctcatgcgaatgcatttcagaaaataaacaaaggaaacattttaggccttgtccgtcttggactggtgcagcatccaagtgagcaggtcgaccttggtaacgatggccaatggcttcatcgcaccactttcgtccttctcggtcacaactgcagcgctattccactcgaagaagcggttcaggacgctgagaggggtatccatggtgatctcgatgaagccacgactccgggtctgaggcttgaaggagtctagggccttggagaaatcacggggatcggtgactacctcggaaatttttgagaagtcaaacatgacttcagagacggggctctggcctgaggcccggccgtgcgtcagtcggctgagaacgttgcccagcgtgaccagaccgacgagcttacgtccggagggggcaaggactggaagctgatcaaagcctcggtcgcgcatgacctcgatggcagtctcgcaaggggagttggctgtcacggtggtgatgggcttcaagcgcaaggagctgaccttggcattggccagagggtcagacacaggcacatgagtttgagttgtcgatgcaacggcgggaagcgacgggagtagatcgttggcggcgagccagtcgtcatcggcgaacttgaatcggttagcttgaatggaagatcaatcaggaaaaaaattgttccgaccttggagaggtaacttctgatgctgtcgggaagaatcacaacgatgacatcgtccttggagaactttttggcctcgttagccttgaccagagccgcaattgcactaccactgctaccgccgaccagcagaccctcctcggcgatcagacgccgggagtacttgaaagactccttatcttcagtcttgatccaatgggtaacggcattttggtccagaacctcggggatgaaatcgtatccaataccctcaaccttgtaaggttcattggcacgagcttcgttgagggagggaggcagagcgagaatagaaccatatggatcggcggcgatcacgtcaatatcggggttgtgcttccgcaggccacgagcaagaccggtgattgtaccaccggttccagcaccagcgacaatagcattgattttaccattggtctgggtccagatttcctcggcagtgccaagctcgtgtgccaaggggttgttcgggttctcgtactgatccaagatgtgggcgttgggcaattccttctcgaggcgtctagcgacgccgatatgcgattcgggcgagtcaaaggcggcttcgttgggggttcggatgatagtcgcattcaaggcacgcaggacagcgactttctcggcggacatcttctctgggagagtgatgatggtcttgtagcctgagtagagaaagaatggacacaattaagacggatctgacaagtaaagcttatacaataaatacatacccttgacggcagcaaccagtgccagaccaataccactaatgaatctcaattagcgtccgcgcccatgaccgctcgaagcgaaagagaaggaaggaaaagacctacgtgttgccactggtgggttcaatgagagtatcaccaggcttgatgcgaccagttcgctcagcctcttcaatcatacgtagggcaattcgatccttaacactgccgccggcattgaagtactccaacttggcgtagacagtagcatcgattcccagggtgcggggcagatggttcagccgtacaaggggtgtgttgccgatctgctgggtgatagtgtccaaagtgaccggcggggcgccgggggtagtggtagaagccatgatgtatgagttgtgatagagagaatgtagcaaagaagaagttcacaagtcgaagatttcgccatcgacttttgtgccccgcccgatggtagccggctttctctatgtgggcccatatatctatggactttgtttacttttgatattgagtgttataaggtcataggttataggtttataggttggtgtgtgttatatataggtattagctgatgggttgatctatttaccaatagctcatataatgaatgtcaatggtatacattaaaaagtccagaggattatttctataaaacccctaagcctaacatgaaaaggatcagactataattcagactacatactagatatgtattaacattataacgttagatcaagagtgcagttgaggcgagaatttctattgaaaaaaacatatatactgtactccgtaattgaaaaagacgttgagaagaccaaacacatgacgaggccgaatttgtcagtctactcctcgacttcgggagttcaccagctttctctctttgacaacctccaaaacagagatccactggtctcactaactctcgctaaaaacctattacttctgctaactcctgcttggccaaccttaagagctagggcgatctctacccaccaccaatggttgattggctaataatcacctaaagggtcatgttgatagatcaagctcgacaagctcctacagcacgcatatcattgcccgattccataccaactgtccatacttgactagatcattcgcgcttaaatacgacgcttttacaaagccaaggccgtggctgtgcagaaaaatggccattccccacacactcaaatgacaattcatcccctgagagacaaaaggactgaatgcgaatattatacagaacgccaataatctggacaagagagcgagtatgtccaggaagccgagtatattatggtagtacaactgagttcgtcgtcaattcattttatctactcttcttctctagtcaaatcgcgacacgggatacggcgatcttcacgggaaaggcatcatggaacacatcgtggctgcgccaagacctcctggctatccatattgaaagactcgagggctgattggctctgtcaagtgccagcgcatccgactgttgtttttatttgcctcctttatactccgaactccatattgtattgcggcccaggcgctgtatagtctttgcagtccccagcccatcttgcatttttgttttcttctttttgtctatttcagcgtggtttcttctagaatttaccgagtttggtccatctcttatttgattttgtctcacggtctgatattttgcgtgtgcttcatccaattccccccgagctctccgatctctccaatctatacggagttgttgttggttaaaaatgggctcaatcaggtcgacacattcacaaaacgccgatccccgtctccgtgggaacagtgaacagccgaagacggtccaggagaagggctcccagaactcgatattgcccaccaactctaccacttccaagcgagcatgggccttatttcgcgtggacacagctggagagagtggtcgaagcggcattcaaccatggcatctcctcaaggtatgctttaggagtgtctgtacgctctcgatggtcgtgaatatcctctggccatttgtccccgccgcaattgtcattcatttcgcgcgacccgatcttcacgtctggatcttcagtctcaattatatcgccatggtgccctcggcaaacctgctcggctttgctggcggggagctagctaaaaagttaccaaagatgataggcatcattgtggaaacaactttgggcgctgtggtggaactcgtgctatttatggttttgttgtataaccatggccggaccgaaaactcggatctgattcctgtcatccaggccgctattcttggttcaatcatggcaaatctcctgctttgcttgggcatgtgtttctttgtcggcggtatcaagcgtcatgagcagaccttccacgaagccattagtgaagtcggtactgggttgctccttgtcgccggtttcggtctgttgattccgagtgcgttctactccacgttgcgtggaagcgtcaatgcacagtttactctggtgcagttgaacgaatatgccttgacgattagccgtgccactgcggtgatccttctcgtagcgtttttgacgtgagtggcctaggctcttgcctataatttaaccactaaactctgggatagatatctttttttcaacctacacagtcacaactccattttcgatgatatcctagagaaagacgaacaccgcgacgaagaccgacacgaagaagccgcgagggcaaagcttacaatgatagaatgcttccttgtcatcgccgttgcactgacctgcgtctgcatgtccgctgtcttcctagtccaagaaatcgagtacatcgtggagcgcggcgtctcagataatttcctcggtttaattcttgtccctctggtggaaaaggccgctgagcatcttacagccatcgatgaagcctgggacaaccagatcaactttgcactcttccactgcctggctccttcgatccaaacagcactgctgaacgcaccgcttactgtcattgttggttggggtatgggcaagaatatgagcttgaacttcgagatcttcatggttgtccttctcgtgctttcgattctggtcgttgggaatttcttgcgtgatggcaagtccaattaccttgaaggtgctctttgtgtgctggtttacttcatcgtcgctgtttgcacttggtactatcccccggtgcacataacctcgaccaaccagtcttgaatgtcgggtagtttctaagcgtttttggtccgcggatattttgcatactgtatatcactcgtggttggtgtttttgaagagtttgatagagggggggggggactaaagctccattagatggtcagagtaaataatgtctgaacatcagacagcacctaactagtcagataaggccacataatgttatatgacctcatatgagacaaaaacagtatgatctgaccggtcattattccagggttgtctgaggacgcaaggcttcgttcatcaacatctgcgcatcaacacgcagctcaaagtcggccaggaaacaaaagctgatctcgagtttcgacaattcctgcgcactgactccaccgaccttcgcaacccggctatgcggatagctcaagtcctctagagcctttgaagcaaccgaaacaccagcaagcacaagcctgtgcatattcttgggcaggacccttaatacattatcgaccagcgtcatcttggatatatatacgctagctgcgagatagaccgcagtagacataggacagtacctatgcaaacgaagcagatactcgttcaacggaatcggtggcaccttctttgacaggaacttcttcgccaagatagccatctgaatcgcttcttccgtcgccttggcggggtcgacaggatcatctgaatccttaacatgcaatccgacgattttcaccttgagctcatcctcaacaggggtatcagaaactagagtcgcggaaccatgcgtatgcagctcatcggggctgatgggtttctgagcaaagtaagcgcctagccgctcaacattcaaacaaagcaagtgtaatgcagcctcgggcgaaatatcaaacacggcggcgggggtctgtgacgaatcaggatcgtcggcaggttggtgacggtcaatattatccaacggcgagccgagttttagcatggttggcgcggggtttgcgttttgcttggaatctgtgtcttgggacacggacatggttgtggtttgcgttacggcggtggccatggtgtgcgcgtatggattgctgtcactgccacgcgcaggcgcgggcttgatagggggttgcgagtagcgcgcacctggaccttgaggtggatggtagctctctggctgggtatctcattttccaatgagtggtttctggcctctgtagggacttgggttcacttcctggcgaatcccagaatcgatcacgggggagtcgggagagttgatgtgatatgatcgatgatgttccctttttgtagagttgtatagcggggtgagagtggtaagttgtttggatctctatgcggaatgagaagttgaccaccaatttccaatctaaatgttcagctcaccttgaaacctgatacatatatctgtgaataaaaaccgaatcaagtatcgagttaaattgaattgagttgaattaaaatcaaaacaaatgaacttaagtcgagaaataaggagaacaaggcaaaaggggaggataagaaagtcgccacatgtgaccttcaccttggaatccatggactatacaaaacaaaggtacaacttgagaatcatcacatttcccaaccaggagaataaaacgaaaacaaaccccctatctatatatttaactagactccatacaaaaaaaaaaggctcagcaactcccgatacctgtctcttctttttttccagcagactatgagcctcctactcccgacacaagacgcgatcacatatcctagcagactcttgagtcttatgccgggattagggggtaaaaaataaacaaggtcaaatccggattaaacccatacttctgtttgaaaatggaaggaaagacagcctcagcaagggaagcagtttatccacgaatatctgcgaatgtctcgacatgctgggtcacaaatgcgagacataacgcggccagggcaaccgaatgctcggttttagaacaagacgcatggcgctcgtctgcgttgtccaaggacacgtcgacccgaacccgacatttcctgcaatccacgcttaacgggacccggttcgtctgtttcgtaccggctactagcagggtttgagtcccaggtattctgggaccgtgggccccacaagggaccctgtgccggagacctgtattcatattcgtggcctcgtgaggaactccgtgaagacgatctcggttcatactcgtaaccagagtcatcgaaccgaacgtttttttgtgttctgttgtaccgaggctgccgcgtcgacagccgcacatttgaatcatatctccttctagcaaaattagaggccatttcatagtccgggggatcaaccacaaagagcctgggataagctggcggtgcataccgagaactgaagttgccaacaggctctgatctgtaagttggataggaaggccggtacttcatatctatcgagtgtaggtatgtgcgctgccgtgttaactatcttgaattagcttcttgttctcgatactcggtggaacccaatgatataactcgagggcagtggagtgctaataaatgattcatgaacaatgcatctggagacaaagacatccttgagcaagggagttgttgaaggaacatggcagagaaatgaatggagatcgacgaacctcgttgattacagcagcacgcgcgaattgccgggcacagtatgcgtaagaggacatgtgaacaatggcaaagcagattcctttcaaagagtaaagatagagaagtattgatatatttggatcgagacaaagaagactggacaaagcaagatcgtttgatatggattaaaaacaaagatctttatggcgagatattgtgttgattttatattaaagcattttgacaatgaacagggatttgaaggcaacatctgctcgaagagaggggacctataatgaagttattaaatgttgatattttctgtctccaaataaagaatgactgatacaaacctgaggtcaccagggcgcaggtcaacgagtcagcggctttgaaggccagttgcccggtgacaagattcgttgaaattcgacaaattccctccaacctcttccatcacaccagaaatgtggattttgggagtttcatctccgaaaagaggtcctatatcaagaagtgatatagtgtgattagcagggtgttccaaagtgaggcccaacttgaggagcggcaagatacaacggaacgcctgttattgtccatatcataaccaacaccgactattcggggaatagtgtccaatgccttgtacaatggctggcattactgcctagaatattcactgcgcaacattatccaggggttttaaagtcacggggaagggatccttcagccacacgccaccaagcgtcaaatcagaggtcaaatcactttggcgctaaaagaacccaacggcgattaagagccaaccattgacaccttcgacaatgagatcagacaatatttcatgcatgaacgctcagatccataaaaacaatggaaccgtgaagaaaaaaaaaggaacttggcttgggcagtaaagcttcgccacgattcctatgtccacctctcaattaatcgagcttgattgctatcacggtggtggagaacatccaaattgagcttttgagccccattttgaagactcgcgagttctttctcgaggcttgagagcgctgactcctccgaaggatcgcgcagtgatgtttcatagtgagagttggcgtgcaatgagtaacgaagaagctgggatgcattatccaacggtgccaaataagtcagcagaggagcgtccaccgctatattaagaccgtgcagtgtttcggaaatgtgataacgcttctcgtggaggtcaccaacccctccattttcgcgcggatggaggattgattccggtggtacaccaacacgcctcagaagtctttcgagtgacggttgggcaactacaggcgcagtgggcgtgcggggggcaagaaggaagcctggctgtaacgatcggcgtcgcagagactctcgtcgggatgatggctgtgtgacgagttcgctgcctgcttcggattgatataacgcggctagctgttctaatagttccgaggacgactcccggactccgagttggtttgtaagatcttgcttcgacaaagtcatttcgatcaacatgtcgagtgcctagaagtatgaattagttcattgctggtcactgacactgccgaggtagagcctcatacccgttctagtttctcctgcgacaccactcgcagctgatcatgctcgttctggagttcacggaggataggctcatggaactgctgcctggtcgacatttctgccaagatttcgatctccggatacagagactctatttcttcctcgagggcagtgttcgttgcctcatacgttgcgtcggaatttgaaccgcctccgtgaattgtttccagatataatcgatctagacggtagtgtatttcctccgccacgtagcctgagagcatcgcactgagatgatttgtgcgcttgaccgtagatgcatcgtttccacgatacttgatattagacatgagcgtttccagattcgcgagcgccttgtcgtcctgctttaaccgggtagacagagaagcgagtattctcttgctttccgcgcccgacttatccgttgcggtcctgaattcagcctccaactcaccgacaagctcgattgcctacgtagagtcaggatcagcaacacgcgacggttggttgtgacgggcatgcccctaccgccatggtagtattttgtctccccgcttcatgtttcttttgcagccgagtgatatctcggctccgctgcagctccacattgttttccagacctaattgcttgttgagacttgcacattggagcttcaaagcttcggtctgcttttgaattgttgccgttgaggcttcaagggactcgatggcgttgcggagttcgtcttcgaggataggccgtgttgcgccgagatctgggttgctgataataggctgaagagcgccggagtttacaagcttaatatatctgtttccagttagttccgtcttctgactgatggtgcaaataagacgtacaacgcgagctcatcttttgatagcagggtgtctggacggagatgcttggccgcccattgcgcgttcctgtcatcctcaaatgacgactcaatcacctcccgcttggctgggatatctcgatccttgaaaattgatatgagtttgtcggtcaaagtgtcttccattgttggcttgaggagttgtgatgcgaagacctgataaacaaggagctctgagagtggagctccgatttctcttggagtcctttgttgagaccaacactctcctaggtatatctccacaatactcttactgatgcataatttatctttattatgaataacttttctagtaggagctatagaattatattctgtatgaattcagaagtctttagtcgaatcctttaggatataagccgattaaagagataaaatgatggatatagtttgaaggaacctctgttcctttgggactattatatatatctctctctttcagcccttgtttgtccttggataaaagacatttcatttcagcaggcaacaaatcttgaacgctcgagtataaaataggttcatcccacagggttctgaatgtatcgccatcgactcgagctatccaactaaatatttctaaattgaccccttaacactaaaatcagtaagcatctcttgtactaaccaccatcatggatgcaacaactctgcaggccgcgcgagaatttttcgccgactcgcgagatgatttcgtcgtatatatccaggaactttctgccggagatatctcagatcagggcgccgctgcaatccaaaccgagcttcgtcgtatagcccacacactctctggatggatggagcttcgagatgatcccaacggaatgagttgcagctatttttcagagcggtgctgcaacctctcagatattgttgtagaagtcgctgagatggtcactatcaaggacggacagctccctcccacagttatgaagatgttcggtatgctggctatacacttaggacgacttaatctgaacggccatcgcgaagaggacaagtatgcgcggggctttgatcgcatggccaaggatgaagatcgtagatggcagattggatcccagggaccggatgatggtagagctgaacttcttttgggcttgtggactcgtatgaatcggatttcagagcctggtcccaattgtacgttcgagtgcctgcgtgcacatgcgggttctcacattttataggtcgatgagtataacgacgagggtataaagatcggcagagcaacggagaaaagaggccgagactcaaaatgcggctgcctgtggctgagtaatcaggcaaaaaagggagcaatcaaacgtggatgtcaagaacaagacaggaatatattagaactgtttcaatttcatcgagtacagcgtacaaaatactacggagtaggcacagtataagtgtacctgcgacgtgtctctcaattagcgtctccgcaaattcgagtccgcctttttgaccctcaccaatctgtttaccattaccattcattcaccactcaccacttaccgttacctttgaccatctctacaacttccgagctgcgcttcttgaaaacttccccactcagtggatgcgccggcgacggaaccgcgatgttcctttagactaccgccgtctcaaaacaatccagtcctcgaatcgagtccctttccagcccccgggtggcattcgatacatattcaacagtagacaacccgaaaatgtctgccaagccctctttagaatcccttggccccagccatggccagacctccggttccactttcgcctcgaatggcaacgggacagctattcctccaaacgacgtggagatgaagagcttgcgccctgatccccctaagggctcaattcctctgggggaggatatcatgcagttggctcggatgggggaagttggcactatgcagaaactgttcacagccaaaaagttcaccgcaaactaccgtgatgaggaaggaattacaccgctgcatgtttgttacaatctagcgcaacaaacaatagggatctgtttactgaccgcattctctctttctagtgggcggcaatcaacaatcaatatgcgatgtgtaaattcctgatcgactccggagccgacgtcaacgccaaaggaggagagtcggtggcaacaccagccatgtgggccgcccaacggtgtcattattatattgtgaacttattgctccagaatggaggggatcctctcctgacggacgtccaaggatataacatcctacacctcgcgaccatcgacggcaacgcgttcctagtcgtgctgcttttacaccaggagatccccgtggacgttgttgaccaacaagggcatactggactgatgtgggctgcatataaggggtatcctgcatgtgtagacttgttcctgcgatggggcgcaaacgcaaacgccgtggacgaaggtggcttgacgccgctccattgggcgctggttaagggctcgatgccttgtgtcctgaagttgctcgaatacggcaccgaccgctttgcaaagacccgcgatggaaaatcacctgcgactgtggcgcaggaaatgaacaccctgcgggtttggtaccactcgctcaacgagcgcggctttgaacccgatggcacccaaaaagtggtgccactgggcctttccagcttcgtacgcagcaagagcatcatggccaagttcttcttcctttggccttttttgatgatcctgattaccatttggatgctcagtagcctggcgattttcatcgctgtgcccctcgtgttagttactgtcttcgggatgcagtatgttgcacagcaatttgcgaacaaggggcccatggaataccgcgttcttcaaaaaacaccgtatctagctggtgtctttgctggcacattgttctgggttggcttccgctatgtcttcaaggtgctgccggcaacatactcatcgtcgccgattctgaacatcttgttcgcagtcttcttctgcttgactgcttatttctacgtttttgccatggtcgaggacccgggctatgttccgaaagtgagcagcaggaatcagcagagagaggttgttaaggaactgttcgaccagtggaagttcgacgaagagaatttttgcattccctgtatgacaagaaagccactccggagcaggcactgtcggcgttgtgggcgctgcgttgcgaaacacgatcagtatgtgtctcgataagtttctattgatctgactactaatgcttgaatagccattgcccgtggattgacaactgtgttggatcgaacaatctccgccattttgttctttatatagtctccctcgaagttggtatcattctgtttgtgcagctgactattgcctgtgagtactagtggcgaaagaaaatattggctaggatcagtcatctaacatgatgcagatatcaattccctacctgctcccgtcaatgccacttgcaatgtcatcaacgacacattgtgtgattacgccactcgcgaccccttcaccctgattcttaatgtatggatcaccctccagctggtctgggttacgatgctttgtgccgtccagctcgtccagatctctcgcaaccagacaacctacgaaaacatgcgaggccaccacatcgaccggtcctacccaagcacccaagcctttgcgtcggccatgaccgctggaaccacatcaatggaggccgctggtctttcggcttctggacaaggaccaaacccggctctccgcggttctcccgcacaccgacggaaaaacggctgcatccagcaatggtcatcccttctcggagtcgacgctttttggacaactgcgaaggatggtctccgcgatggaccccaggcaactagaccccgcaaccccttctcccgcggtgtcgtcaccaattgtcgtgacttttggtgtgacccggctccgctcttcggcaagcgccagactggggtggcgatgctcggcggcgaggtgatcaactatcatgatatgtacgaaaccccgatgcgcatgcgcaccggcaaccggtccggcgaggggcctggctaccgcagcgttgctggcgaggaccccgaacgcatggtataagccgatccgagatcttagcgtatttgcatttgttttcgattccagatcctgcattgatatccctctactttgtgttttattatgcaaatcagcgcggtgttgcgttattgggccacgtggcacgagcaaatgtttgcattttgcatttagaaaagatcttgtacaattgacgtcagatattaatgatttgtttcactatactattatgggggatgacttggctcttgagcagcaagacttgactttgactatggggtatacatatatgacacccacttagcatccaaggtcctcaacctccaacccccgcagtttcacatttcgcatcagataagatagatcgtctcggccgtgcagtgaccctgcaggctgcagctaatcaccaacacactgcataagggccgaattccggaccttccctgtgcggttctggaaagatacctagctaggaagggtagtcatattcccgtccgaagggaccgattggttcgtccaactgagtctaggtctaggtctaggtccaggtccaggtctgtacatatgtatatgtattgaaaggattatgctttacattacgcattacgcattacgtgagtataaaagtacctgcatggaagctctagaggtgcatatgccagcgcacactaatcaccaagcaaggaaccttggcagggctgcagcctttcagggacaagcaatgtttgacggccgagggtccagtgtggcctgatcttctcggtgatgcacttgctaataatgtagcggtcaacaaccgcaattggtttcttggcttattacacaaggtactcttactgtgctagggctgtcacctccccaaacttccctagacgcttccggaacaggcaatatatacaatgttattatacggtatagggtccattcaacggctttcaagtatggagcccgaaacaagtccgaatcatagtacgatctgaaacctacctcggtatggagatatggagacgaacgacaggagcagggagagacgtcaaatagtagctgtttcctgtacacatccgatatcgccgaagaaacagccgaaagatctaatctctcgggtaccggcccagtcctatggagacacgagccatgtgcatgggtctttggtagaatacagtcactatgaaaattagacaaatcaggtacatgtatgtcggctagtttcttcaggggacaaggtacgatccacctgtaactatcttttttttttatatattgcacgtcgtacgatgcacatggagagggcttccgaatcaagggaatagacagaataagacagaattataaaattaaaaaataccataacaagtgcgtatgcaggctccatttcgctaagactcgactaggcaggtgatggagcttgaggaagccacttttacttactccatagtgcggaattgcgagctctcatgaattctacatatgttgcccacatgaagagaaggtacggtcaagcctaatctaattaaaaaggagaaaaatgagaagaagaaacctagccatataaaagatcatataaatccaaaaaagaaaagaataagaaaaaagaatacccgccaagtcctcgatcagataaaaattttcaagttatctgatccatgcaggacccacttggatttatctgattcgacgtgatttattcagcttcggagactggggattcgtgttgacccaggaaataaaacaaaacgccagctaaatcgacatgaacctacacaacatcgtgcacaagctatgcatcctattagcaccatctaggattgggatcggcacgagtttcgcgcgacttcctgcatttcgtccaattgtcccgcattcgccaaggaaccattttcttctcaaaagttgtttgtgaccgtaacacttccgatcgggcaactccactttataggtccgcacacatgtttcggtactggttactttacagggatgattctaattgcctgaagatctgggccgatcggttcgtactgtgggtagactcggaaatgtgaagaaaattagaaaacaagctcatcattaacgcaaagaatagaaataagaaaaaaagaatctaaatacacaggatgtctaaatgttttcacccagaatagcgaagggaacttagaacagcgaagggagggggaatcatcgagctgtctcgccggacaaattttaaaatctcggcccacttcccaaaagcaaacccgagacacgtaacgacgatcatgtcacattttgtttcacggctctacagcatagcacgtacccgggtgtcctgcaccacgggagcaccagccaactgatccgcaaagacggagccaacaatctcgccactccgcacagccagcaccgacagcaaagaatcactcagaccgtgggtctgctcgttgcagccctgcagccagataccagcctgggcactgaccttggcactgtcgagtgaaacacggtaatcgcggccggggttccaggccgacgcgccggcgggccgcaagctgcgcacgttctcgaggagttcctcgtgcgcgtcgcggaggtagcccgtcgcaaccatcagcgcatcgacatccaacacctccttgccctcattctcgttcttgaccgacttgacgtggatgcgcatgcggttcgatgcgttgtggtgctcgatccgggcgaccttggtctccgcgaggatacgctgctgccactgtgtctcgtctggattctccacccgttgcaggtacatgtcgttgtagatggactcgatcagctccaagcgaaccacgctgtagttggtggctttttcgatcgcgatgcgcttcttgcgctcttcggcgctcatctcgtagaacttgtctacacgctcggggttgaagatctcgttcacgctggaaaaaagcaaaaaaagcaaaggttagctgggttgtggtactttggggctgtgtatttgggaggaaaacatacaaaggagagtcatcactgggacgcagagcgctatcacgcaggatgagggtggtgcgcgagttgggatagcggcggtgcaaatcgtggtagatctcagcggcactttgaccactgccgacgacggcaatgttgtaaggggccatatcgtcagtcagcatctggggcaggtgagtgcagtacttggaggagtgcatgatgcggggatcctgggggaaaccaggaggcatcttagccttgccaccaagggcaatgacgaccttgcgggagttgcgggaggagatctcgccagtaccggtgttgcgcgagacgacggtaaaaaagtcaacaataccacgggcattggtgggaccggggacgacctcgacgacctcctcgccgtagttgacgacgttgtcaaagtgcagggcacaccagcgcatgtagtcctcaaactctacacgggccggcaggaacgtgcccagattggtgaagtggatgagacgcttcttgtggtggaggtagttgaggaaagtgaaggagctgcggggatcgcgcatagtagccagatccttcatgaaggagatctgcatacgcgagcccggaaccagcatacccgagtgccaggcaaactgattctgcttctccaggaagcagaccttgggcttgaagttggggtccttcaaggcaccgagggtagggtccatagcgtcgttcagggcaatggcgacagcgagcgacgccgggccgaatcccacacagagcagatcgtgcatctccccggcgccagttggtcgcaacagcgaccgagctgcctggggctgggtacgtggcaccatatcgaggaaggagagctccttgcgggtgacaggctccatgacgattcaagggtttttagagtaaaaggtaaagataaaaaaaggttaataagtatgtgtatgtatagaccaccggaaagggaaatcccagagcttcaaggatgagcttccaaggtttttgtttttggttcagagcaaagaaaaagaaacgggaaggaaaaaggctttatatggttcggagacgaatgtagcggatcagataacttgaccaagtggatccgcctgaaggttctctgaagccgctgaagcctctgaagcccttcgcctcggggtttttattatttttctctgccaagttttcgtatttccctggttcggggtgtttttttcaattttatcaattttatcaatcagtaaatttcccgttggtctccaccgaggcagagacggcgatgttttatttccattcgggtgtatttttcttgtatgtcttataacccggggctcagatgtatattatacttctagtaccttggattagagactccactccatatgcaggaagatagaagaagaagaagaaaaggttcgatgcttcatgcacgcctaactcggtcaaccagagcgcagccatttataattcctcgaaaaacccaaaaaaggtcttacggccgatgtcgggaataattggacatcggaggcatgtccggaaagcgttattgtacgtattcgcatgtgtatataacatgtgtatgcacgttgttcttcctcttggcaacgcttgggactcgtttgcagtgggggcacatcctggaaaactcctccgggctatagccagtggttagggctttttgctttttattattatttgtttgacgcttgggcagtgggaagtggaggtgacaatgatattatatgaggctattattgctactgccattgtatcatccgtattgatatgtttctatttactgtacctaatacgtcattcataaccggacactttcacagatccacagctgtttcagcggttgaatcagccgagtggtgggggaacgtggtctgatgattatgcgtacatttgaaatttcgaagagagaaggtgctggatgagagagtaatagagtcatacagaagagaagaatagaactaggagacttagtagaatcataggctaatattcttttccgcgcttggctcggtgatcataaccccccccccccccatctcatgtattctcccgtatggatgtgcccctcgatttgctctttttaaaaaaaataaaaacggacgagccccttgcgaaaaattcctgtatgtgggacacttttttttggcgcgcttgcctgcataagatcttctccagccactcacgttgcacctaattagatcgactaagcaactctactacctacttaggtatataccttaccttgaatatatgtatgaatgagaggagagggagagcgagagaaaaaaccaccacccaggccatggaccgattcactcaattccctgccgtcaatgacgatggtgatgatgttcatattgtaccctggcaggtggatgcccaactcccctcggagatacttgctttgtcatgggcagtcttgctacgtgcattcacaacggatgagaatcccgtctttctattgaatggtgcgccagtcaaggcagatctgtctgcccaaacggttcagccagcacatctggctgccgtatcagatctctcagtcaaacacactgccatagtgctgggagatcctccgtccgatgatgatggacatctcccggtgttgcagtggaccctggaccccacgactcagctgggaactttgcgtgcggctggaggcatggatgctactttcctgtaccagttgggcaaccagctgaaggtgatcgtgcaagagcaggctgttctaaagggtataccggtgacagtgtctgccatcgaggttcctgatctagccatttcaaatgcctccccctccacattaccagggccccggcttctacacgagcttgccctgcgtgagctcaacaattcaaaccatgccattgaattcctcaaggcggatggaaacgttcagtgcctgtcgtaccatgacttggaccggctttcctcggagctggcgagtaaaatagctcgtgcttcgacgacctctccgggcctacagaaggttgtgccagtacttttgccccagtctgtggaattgtacatttcatggctggctatcctcaaggctggcgcagctttctgccccttgaacaccgatgcaccaacagatcgcatcgagtttatcctgcaagatgtggccgcatcggtggtggtcacaaatgatgctcttgtaacaaggataccgctgaaagagcatatttctattctcacagtggacgatcttcaaaccaacgccgatatcacagagccatgcgcagaaaacagcacttccactgatctggcgtatgtcatgtacacatctggctctacgggccgccctaaaggcgtcggggtgtcccatcttgctgccacccaatcactccttgctcatgatgatttgataccccctttcaagcgctttttacaatttgcatctcccacctttgatgtttctgtgtttgaggtctttttcccgatgatgcgagggtcaaccctcatcgggtctgagagagagaatatgcttcttgatatttcccatgtgatgacgacgatgagagtcgatgccgctgagttgaccccaacggtggcaggagagttgctgcgcacgcgagccgccgctccgtctctccgagtgctcctcacaattggcgagatgcttaccagacacgtggtagacgagtttggccagtccgagggcaggggtggcattctccatggaatgtacgggcccaccgaagcagcaatccattgtaccgcggccacccatttccaggccaaggatcctgtcaatatgattggaaagcccttcaaaaccgtgtcggcatacatcatgccactcccttccgacgagccatcctccaaggagcttcgtcccctttcactaggccaaattggagagcttgtggtgggtggtcctcaattggcagacgggtatatcaaccgacccgaagaaaatgccaaggcttttatagacagtccggtgtatggccgactctatcgcacgggagacaaagcccgcatactccccactggagagattgagtgttttggccgaatttccaacggccaggtgaagctgcgaggtcagcggatagagctaggcgagattgagcatgttatcaccagagcctctggtgtccgcagtgctgttaccatggttatcgacgggaacttagttgcatttgttttggttaccgacaagggaacgacggacattagtctccgagatgtctgtcgtcggctgttgcctcgctttatgatccccggagaattcctgctcgtcgaccaattcccccaacttccctcgggcaagatcgatcgtaaaacactagaagccaatttcattcgccaccgaagcactgccctggcttttgatgatcaaccctgccgagacgaaaaagaggagtctatcgcctcaagcgtagccgatgtgctaggccgacgactcccgtcgacagagagcctggcagcagcaggtcttgattcgctagcagcaatccgtctcgcgtctcatctcttggatgcaggaattcggctaggtgtggcttccttgttggaggccgactcagtggacggaatctggcaacttgccaccagtcttgaagctatgagcccaaataatgatacgcaagcagccttgcaaaccattcttcagcttgttttagacgcaggtgcagcaagggtcgactcgctgggcttgagcgatcaggtttcggacgtcataccgtgtagccatatccaacaggctatgatcttggagactgttcgagataacaaggcatactgcaactggattgagctggaattcgagccctcggtcagttcaactgcggtaaagaatgcatttggtcaactggtggaccacaaccagatcttacggtccggatttgtggaaatcggcctcaaagatcactcatatggtcgattcacctggaatactgtcaatgaccatatttccctgaaacatgaacttgaatacgatttgggcctgagtgcgggtcacgatgtcttgaacccttttcgagtccagatcaaagaaggcaaggaccatctccgcgtgctggtgcatatccatcatgctctttatgatggatggtcttggcaaattatgttgaaagatctcagaagtatcttgtccggagaggagctcacttccaaaccgccatataacatcgtcgcaaactatttcattgagcacaaactggacaaatcggcaatagagtcctcagtgtactggcgtgaacaactccaaggtctttatcctgcaactttccctattttccacggacatacagatataatacatgctaccgacaaggctactcgcgtgctggacatatccgtatcaaaactcaaccaagtttcccagcatcttcgcgtgagccggcaaaccatttttcaagccgcgttttgctatattctctcttcctacattggaaccggtgatatcacatttggaactgtcttttcaggccgaactctgcccttgaagggcattgaaacggttctcgggccttgtatcagaactttgcctacgcgcatgaacctcgacaaaatgcaggacgtgaccgatcttcttttggccatccagaatatgaaccgcaagtcactcgagcatggcagtctttctcttcaggatatcaagaaggcttctggtatcgacttggatcgcagtctcttcgacacagcgctcgtgtggcaggaaagcatttggtcagatgatgaccagggctcggtgttccgggaagttggagcgggggagtttttagaatttgcgctgttgctggagtttgagccgcgagaagaaaacatctttgctcgggcgacatatcaagagtcggtgctaccagttgagcaagctatgatactactcgagcagattgattctgtggcctcggtcttgattgacaagattaagcttccaatccaggagattcgatcgtatcttccctcgtcaacgctgtcaattgaacatgcaacattacgcgatcaagtcaatttgccaagcctggcatctagcgtcgagatgattgcttctacagacccggaccgggtagcggttgagttgatgctctggaagtcagagaattctacttcgttgatggaaagcatgacctatagtcaactaaactcccgagccaatggctttgcacacttcttgctccatatcggagtgacaaatgacgatctaatagccattcatctgacaacgtctcttgacttttatgttgctgtgcttggagtcgccaaggccggtgctggtctcctcctccttccccaggcttcttcgcagaaaatccattctattctctccacggcgaaatccaagttctgtatcatcgaccacttgacggaaagagatcatagcttggattctctgaagtccgtccagctgattcatctcttttattcactggatgtttaccatgagtttaatattccatataccagtaaagggtctgacgttgcctatgctgaagtgtcgctaattgaagatgacttgattgaaaacatcgtcatctcacggcaaaacctgcagagcaatatcaatgctctgtcagactcgtatccagcgccaaccggatcgaaaatgctatcatgtcttcagggatcaggtggtaagttttccatgacattttaattttcagattatctttctgacaagaatacagcatctatttgccaggcattctttgcttggcatgctggcatgacattgtgctcagctacagaattgataatgatgactcgtatcgagcaagcctgtcaagacatgaacataacacacctgcacttgcctcccatgctggcctcccgtattgatccacaagccgtccccagtgtgcaatatctcctctcttctggtgaagaaatgacccttaagctccatcacaattgggccggcaaaggtctgaatcaagcatacagcaaccatgcactgactcacgcatgtactctctgtcttaatatgcaggcatcgacccatgttcgaaacattggtagacccctgaagaacacatctgccatgattgtagcagatggagattcgctcagccttcttccacgcggtgccattggagagctatgcttcggcggggatcaaattgggcgctgtctacctgactccaagtcgccagttactgggcgattcgttgatcatcctgagtttggtctgatctatagaacgggtgactctggaaggctgcttcctgatggtacactcattctttcccgaagctctggccttgctcagtcgtatgctccgtctattgatctagacggagttgatcgtgctctgatgtctttagaaatggcaaaagaaacagtgagcatgattttggatgagccgacactgcgattggcagtgttctgggttccttcaaagaaatgctcaggttccgtgcaaatcgagaaggctacgaatgatcttttcaaggagctcaccaagaaactttcttcttctgaccttccatcccttcttgttctcgttgacacgatagatctcactaggtcttataagattgattacttcaagctgaggcaacggttggggcaactgataacgaaggagcttgcgatattttcaccaaagcctaataccgatactagtgacagtttcactgatcttgagaagactatctctgccgcgctatcggcagtcactggcaccgaccaaacaaacgtccgcaaacacacatctttctacagactgggtctggactctctttctgccatttccttctcgcgaaagctgcaggagtctggatgtggaaggcttgccgtgtccacaatcctgcgccatagctctatttctcaacttgcagctgtcattactgccacgaccaacggggatcagcccgaaaatgcggtgcccgcaccaccaacagtgttcgatgaaatcttcactcatcaaatagaagatgagttcaaagctacagccataaatgttcaaagcatttacccttgcactccactccaggaggctatgcttgcagctgaatctggtgatcattcggcttatttcaatcacctcttgcttcttgtgcataccaatgccgagaccatgagagcagcatgggctaagatgatgcaaagacaaggcattcttagaacttgtttcacgcaaactaatgataggcggttcgcatatgctcaggttgtactggacacatcggtcttaccgtggtcccatattgaaacttcctcttctgagcttgagaatgtcatcaaggaaaacaagtccaagttcgagggtatttctcctgtcaacggccagttgccttactcattgactttgataaccgattcaactgcgcagcagacatatcttctactgtccatccatcatgcactgtatgacggagaaggtatcgcccagttattgcaagagctccagctgttgatttcaagtcaaaagttgccaaagaacactccattccgcaacttcatcgattacatgacctctgttgattatggctcgtcggatgaatactgggaccagtacctgtccggtgtttcaccgaccctccttcccacacccgggcccgcagccaatgcaaatgagtcggcatcacagcagatccatacatccctcaatggctctttcgtatcattcaggcaaaactgcaaagacctctccgtgacccctttgaacatcttccatgctgcatgggccagactcctctctctatacaccggttcatccgacgtctgctttggcaatgtcttcagctgccgaaccgttcccttggatggcgcagatcggatagtcgggccttgtttcaacacactcccaattcgaatcaagtcttcttcaacttcaacaaatagtgacatcatgaaattgtcccaaaagagcaataacgacattttgcctcaccaactcagccctctccggcgtattcaacgacgtattcttggcgatggctctcgccttttcgagacgctcgtcattttccagaacagaaatacagatctcgattccaatatctgggaacttcttcaggacgaaggaaacatgggattccccttgatatgtgagatcatccgcgacgagtctaaagacaaaatacagatctgcctccacttccaagtatcgtatatctcacaagccgtggctgagaaaattgcgcgggactttatagtccttgttggacacatcattcaatatccgtctgctcaggcatccgataagcggctattaggggcagacattcctcgagtatttgaacataacgtgtctaagacgtcaaaatctgttcagttccccacaaaatctcgccaaaagctcccatggtcctatcgagaggagattgttcgcgaccttctttgcaaattttcggatgtcgactcggataatgtgttccaggacacaacgatcttccaacttggcctggatagtatcaacgctgttcaggtatcggcgaagttgcgtgagttagggtataagatctcatctggtgatattctcgaggtatgtcatattcctgggggtgaattctattctctacctactgacttgtatcaggctgcttctattgatcaaatcgcttcccttcttacttccaacgcgaagattgttgaggaaatcgagttcgactttggacttttccaaaccaattatttgcagtctgtttgccagcaacttgagatttcttcgcaaatagtgcagtctctgcgcccttgtacgccagtccaaaacggaatgctggcaatttttacacattcacacggtgaagtgtacttcaatagaatgaccttaaggtcctcagtacctttagataagaaggtcttgaaagaagcatggtctaaggtcatggctcagcatgagatgcttcgaacaggatttgttgaattgcgcgatcagaataatccttttgctatgataacttaccatgaatacggcaaattaccatggtacgagacctcgtcttccatggaagtcacttctggtgttcaacaaaggcacgctttggaaaatctccaccagcctccatggagcattgaagtcgaagtaggtgaccacaccagtatcatgcatttctctgcattgcatgctatttatgatgctcagtctctggccaccatactttcagacgtcagagcagcatatgaaggaaaggctctggctatgccggccccagtcaccaaaactctcggccctatccttcttgagagtaagagccagagcgaatcagcgcaatccttctggaagggacttgccccagaagtgcagccctccaaattccccgacttaaatcccatccgcacaaacgagcgaacattactcaccacctccatccgttgcatacagtctcgcaaggcttttgaagatgcctgtcgagatatcggcgtgacactacaagcagcggggcaagccacgtgggctcgcttgctctctgcgtacacgggcgagtccaacgtcacttttggaaccgtgctttcaggtagaaacttgtccgctgatgctcagcatgcggtattcccgtgtttggtcacagtgccgacgcccctgcatattgagggttccaaccgacagcttttggactgtacgttgaagcgaaatgctttattggtaaagaatcagttcgcgcctctgtcgcatatccagcgttggctaggtagcgatgagccactcttcgacacgctgtttgtctatcagaagtttaattctgatgccgttggtgctgataagtgggacatcattggcgaggagacgaatattgatgtgagtaacaagcagacaggatactccacaaatttacaggatctaggctaacattatatagtatcctgtctctatcgaattgattccgcactggaacgatcttcagatttcgttgagctaccggggcgatcttgtacccatggagcaagcaaagatcctcttgaatcagtatgaaagattattgcaagatactgtcttctgtccagatgtcaattccaccgattacgactctgtgggtagtagtctgctatcaattactcctgccaaagaagcaccaattcctaccacggtttctttgctacatcaattcgtcgagacgaacgcgatcaatattcccgagaagattgcgtttgaatttgctttcggtgacattgcagaaaatctgcagaagaagacatggacttaccgtgagttcaatgaatgtggcaatcaaattgcgcatttcctgcaggccaagggggctattcctggtggaattgtgggaatatgcttcgacaagtgccctgaagcctccatggcgattctgggtattatgaaagctggatgtgcatatctggctattgaccctggtgctcctatctctcgtaagcagttcatgttagaggactcggctaccaagatcctcctttgcaatcaatcgaagatggcggaactagatggtcttccagctattgatgtccaggcacttgatgagcctgggcttcttgaccgggtttcaacaggggatatctcactttcccgtcctatccagccagatgatacttgttattgtctgtacacatccggtacaactggaacaccgaagggctgcgagatcacgcacgataatgccgtgcaagcaatgctggcattccaacgattgttcgcaggacactgggatgaagagtctcggtggttgcaatttgcctccttccattttgacgtcagtgttttggaacagtactggagctggagtgttggaatttgcgtcacttcctgtccacgcgatttgctgtttgaggacctgactggaacgatacaaaagcttcgaattacgcatattgacctgacgcccagtttggcaagactagtccatcccgatgaagttccgtcgctttgtcggggagtcttcatcaccggcggagaggccctgaaacaagaaatcctagatgtctggggcaagcatggtgtcatctacaatggatacggtcctactgaagttactatcggatgcaccatgctcccacggatgtctgccaatgacaaagcctcaaacatcgggcctcaattcgataatgtggggtcatatgtcttcagccccggtacgacgacaccagtcctacgcggcagcataggcgaactctgcgtctcgggacctctcgttggaaagggctatctgaatcgagtggagctcaccaaggaaagattccaagagcttcccgaatctggcgatcgcatctatcgcactggcgatcttgtgagaattttgcacgatggaagcttccagttcctcggtcgcattgatgaccaggtcaagctccgcggacagcgacttgagattggagaaatcaacgaggtcatcaaacaagctacgcctgaattgaacgaagtcgctaccctggtcatcacgcaccccaaacaatcgaaggatcaacttgtctcctttttcacgactgtcactgcagataagaaatctcgtgctgtcgacgttggagtccgatattcagaagaggaccgcgccctgctatcgaagatcaagggtgcttgccgcactcatcttcctaggtacatggtgcctacacatatcatcccgatgacccaatttccgctgtctgccaataacaaggctgatatgaaagtcttgaagagtatctatcaggagctttcgctagaaaacattcagaaattgagctcgatgagcgttagccagtctactgacagtgtccaggaacagaagatcatatctgtcctggcgaggtttattggttcctctgaggagaagatctcatcatggtccagtatctacgagcttggtctggattctatatctgttattgctttctcgagaagtctccgggaggctgggttttctcaggctcagccatcgaccatcatgaagtgtaagtctggcagtctaggtgttggttaagaattacttgactaacgatacatagaccctacaatttccggcatgacgtcggctctacaggtgcctatctcatcttctgtgtccgtggaaaccttccaacgcaatgccaagcaaggcatcgaggctttcgctcacaaaaactcccacgctatcatcgagcatattggagcccgctacggtgacattgaaaagattgcgccctgcaccccgcttcaggagggtatcatataccactacctggctagtagcacgccgttgtactgctcatctttcactttcgagctcgacccttcagtgaacctcgagaatttgcgcgcggcttgggatcaggcccagagagacgttcagatgttgcgcgccagatttctgccatctccagacggctatgcccaaattgtcatgaagaaagacgcccttccttggttccttgctacggccggtaccaatcaagagattgatgacttgcgcaaagaacgacatgaccactggattgcccagctcgacggtctttcatccaatctatgggaagtcggagtcatctcttcccccaagatatcggtaatgtgtttgaacatcttccatgctctctatgatggaaacagcctagtcctgctcctcgaattggttgcccgaagttatctcggtcagatcgagagttcggagttaatcccggaattccttgatgtgttgcacttgggtcccctttgtaaaaaccctgctgcagaggcgttctggaaagttcatcttgctggctgtcgtgatcgagctttcgccgaggacggccaagtagacagcgcgccaattctgcttaaagctcaaatgaatgcgacagatcaagttgaccatcttcgccggtctctcaatgttacagagcaagctgtccttcatgcctgttggcttcttactctccagcaacaatactccttcgtgccaccacttggtatcattgcctcaggcaggacaatcgatgtaccaggcattggcgacgttattggaccgctgttcaatacgatccccagcaatgtccagctgcatggcttggagtcttggtctgatgtcgctcggcgctgccatgactaccaggtgtccatgattcctttccaatacaccgccttgcgggacatcgtgaaatggctcggaaagaaccccgacgagcggctcttcagctccttgtttgtcttccagagggaagatgataacgacgaatcgttcacaaaagatctttggtgtacacttgactcggaggcccagcatgaataccctctggcctttgagattgtacgcaatagcaagcaattttttacagccactattgccgcaaagagtcatgcggtatcgtcggaagatgctcagcagatgttatctaagtttgagcaaattctttttgagtttgcgcaagaccccaaaagagagttgcccaagataaatggggtgtctctcgcacaagttgtggcggatggtgaagtgaagggacaccacgagtctccaagaaccccagaacataccaatggtgaacataccaatttcgaacatattaatggctctttgtttgaatggacttcccaggcttgcataattcgcgacgtgattgaaacccttgcgggggtggagccgcaatccatcaacgagaacacatcaatctttgaagttggacttgatagcatcgatgccatcaaaatctcctcgcggttgagcaaagccggcatcaaacttcctgtgagttccatcatgcgccatcgtacagtcaaggcaatgagcgagcaactctcaatgacaaatggtcataccaaggatgggacattatcatcacttaatcggctagagaaattgttgaccgagttcctcggggctgaaggtcttctccccccgagcgcgattcgagtcttaccagccacacccatccaagaagctatggtcgctgaaatgtgtgcctctgggtacaagcattattacaaccacgagatcctcgagcttgagccagatgtagacattgaaaagatggagcgggcatggagagctgtcgttagagctcaccctatcctccgtacttcatttgttgaagtctgggatccgaagattcctgtttcatacgcccaaatagttcacaacgaggatcaaattgacctcaagactatccatctacacggcgtctccgtggaatccgttataaagactcagcgctcaagggtccacaataagccggcaggctgtcccttgctctctatcaccattgcagtggaaggggataggcggtaccttgttttgtcaatttcgcatgctctctatgatggttggtcaatcaatctgctccacgaagacgttgccaaatcgtatgctggtgtagagtgttctcgcccgccagccgatgaaattctcgggcaaatcattgcctcgtctggcgacgaagccctcagattctggcgagcaacgctatccaaattcaccccggtgtcattctctcctatggaacatgcggagaatagctcggttgtcgttcaccgagcagaacaatcattatccgttccaatgtccaaggcggagatgttctgcaaacgtcatggcattaccctccaggcgcttcttgtcggctgctggtctcttgtccttgctaggcatgtcaagaagctagatgtggtatttgggcttgtcctttccggtcggaatgtggctaactctgagcacgtgatgttcccgactatgaacactgtcgccatgcgagttattcttcatgggacgcgggtagaattggtgaaatatgtgcaggaggctctcctcgccatgtcggagcatcagcatttcccgcttcggcgcgccagaccagatacgggatcgcgggcattgttcgatacgcttttcatgtatcagaagagaccggtcgaaattgtccagaatgagcctaggcaagtcttatataaatctactggcggagcagccgaagttgaataccctgtttgcgctgaagttgaaggtgtcggggaggatctagttggacgagttgcttgtcgtggaaatgttactgggtatcaagatactcttgtgctgttggagcagatgagcgatatcctttcgtctatcatcgatggtccatctgaacagactgtggattttaccagtgagggagtgaagatttgtggaagcgccgctttccaggatgagtctgaacaaaatatcgagcctgaagcagtgcccgggacactcgatcaggcggaatggtcgccgattgagtcaaagatccgcaaaattctttctattgcatccggggtacctgatgattccattgacaagagctccaccatcttcgagcttggcctggacagtatcagcgccatcaaggtggctgcactcctgaagaaacagtccgtcaagcttgcggtcagtgacatgcttcgggctggtactgttgaaaacatggccaaagcagccaacagcggcctaacggaggtctcgctcacaaatatatcaagcattctccacgattcactcgatggcatcgatgtggcgggactgctacagtcacatggtattgatttgcaactagtacgaaaggtgttccccacaactgcagggcaaacctatttcctctcaatgcacattctgaatccagagatattctatcctgagttttactatctgacatcacgacaattgagccctgaagtactcgatcgggcctgggctcgggtcatagaccaaaccccaatgcttcggacggtattcgttcccacttccgactctccgctattaccctatatgcagatcgagtttgaggttgtgcacattccggtgatctggcattccaagtttgatcggcatcttgtttcaagaagccctaagcaagaatttggggtagtgccggtcgcactgcatgcctgtcaaacgaaccagggaacggcgcttattctgcaaatccaccatgcattgtacgacgctgtcagtttaccccatatactgaacagacttgttacgcactgcggccaagaggatgttgtcaaaccaaaccccgaccttgatctcgcacagctcgtggcattccaatatgttcattcgcccgtggatgtccggcggcaattctggcaaaagtatctaggccaaatctcaacggcggtaaaacgagggcattgcttcggctctgtgcaacatcactaccgaccgggcctggtttcaaatatggccagtgtcgaaaaggttgccaagcgccggggccttagcattcagaccgtctttttagccgtctatgcacgagtgcatttgcagcaattcggtgcagctgaaaccacaaatggcgcagggtctcgcaggcggttaactgttggactgtaccttgccaatcgatctcattccattgagggtttagccgaatctgttattcccaccgttaacattgttccactacgactggatgacaaactcagcgattccaacgacaccctccttgacgccgcccgcagaattcagactgaaatcaacgagatcagccgacccgaatattcgggcgtttctctcctggaaattgccgaatggacgggcatccgaatcgacacctgcgtcaatttcctgcgactccctgagcaagaattgaaagtacccggcaactgtgaccacgcaaagttttcttttacagcaattcaacgcgaggagtttgaagatcttagcggggcagccccggtttcgaaaaatgacccaattccgattaatggcaatggtgtagcgccacctggtgcagccgagacgatcccaggcctcgagcatccaagcgcctcaacggcggctactcaagacatcttccaggtaagtgggggaatgcacatcactttatcctaacgggtaattgagccttatacaattgcttacatttcaacagtctacgatcgacgtggaagccgccatccgtaatggtcggttagactttgggcttttcgcaccagaatctcgtcttgaccgagatacagcggaaactgtgatcggcgctatgcaacgggagatgtcggcattggtgacaggcttcgaatcgatatagaatatctagtgatgctagggatggaagagaggaggggtggaagagtatcccggagcgattccacggcgtatgaagtagagtagaccaagatcgttttttttttcttttttcatgtggatactcttctttttcgttacctttttttttgtgctatttgctcttgctgtctggctcatcatactcgttgcatatgaggcgttgaatgtgtatatgttgcttttcccaatcgaattatcgaactttgatttgacgagtgacggcgggacccacggacgggacgggcccggggatctttttatcttttcgaactgcaggagataacatagatgtttgggtgtagtacatagttagtatagtctcgtatagggtgttataggtacaacatggaccgggttttctttttttggtatacatatatatccctctcgttgacattggaccaagtactagcctttttttcacattcccccaagaataggactgatgaatcagatatggaatataagaggcagtgcgatgcataggtttaagcaagggggatttcgcgtggcctatcgccgacttgaagttgttcttctctttctttttctttttctttaggttagagcaccgactgaaaataacaatatgtatactagcactccgtactccgtaccctgattgaaaataagaaaaagaagagaagcggcatatacccctccctttgtttattgtggcgtcagtgcaggggccgtgcgaatgaaaatcgaagacgcgcagtgttccccaaggacggagtacagcgtacatatgggcttaaatttggatttgggttatcttagagctgagtttgctggcattttcattgggatattattatttttcatgggttataagaagttcttgtctcgatgccatggttttatatagggctatttattgtttattgcttacctaatatttgttgtcacaatcacgcgtcaccctaatccaaatcgggcatccaacgatcaacaacgcgactgcgcgttaatcggtttggtctttatttctataacacacccgaacaccctgaacactttagaatacaaacgtctggatagttgattttcgcaacattctttggtatccccaagtggtttgttaaagcccaactctcgattcccgatcgttggacacaatcacataccaatacccaacccctcctcgattcactttcgcgccctcgtgggctgacctcaccttttgaattgggggaattaccccttgcgaccttcttttttgttggaagaaaaggttccgacacacccttgacactacttttacaagagtgtacttgcaagtgaaacattccacacgccttgatctggttatcctcgggtatcaaaaggcatcaaggtgaaacatcgcaggcacgcaggcacgcagacacacgcgttcgtgcttgtccctaggagagaagtcgaattcctttcaaggttggaatccgatatggaagtggtgtgactcagtcttgaattcgccactcgcatttgatcagtttggaaaacattccattccgcgtgccttccttcggatatcatattcttcgaatatcgaaggtatccttggctcctcgtcttcctatctttcccttttctggacgcgttgttgatttgaacgcgtcaaacccttgggaccttgggaagcttctctaaatctctccatcttgagttttcaaatctcgaatctctgggtatctacatttccttttaagatatccagagcgcatttagtttgcgacgcgctcttcattctggactcattgtgcggcacgtggacacattcccccgatcatggttgcaaccttttcgccgcaccgggactccggtggcacacttcatctgccatcgcactcgggaatccatcacgttgacgcgagctctgctatccgccaactgaggcgctctctttcgcgctcaccatccaagagttcgaacttcttcctcaacccgcgtgctcattccccctccaaatccacttacatctcttctcccttgtcaccctcacggcgcgcttcgcataacaatttcgtcctcttcccatctcatcaatctcaccagtcgcctctcgccgtcccttaccctcctagcgcgaagattactaggccagcaatgcgtcgacgcacatcaccccgcagtccacccaagcgcgttttgagtgtttcaagtgacagtggtaacgcgactccaactcaactcgtcgctttaccctctggcgaagaaaatgatttgactctcgatgacctcgtcgcgccaggtcaaagtacgaccccagacagcccttgttttattaacactactcctgcccctcagggtgaatcgacttttgcaccgcgctcaagcttgtcgcgcgttgaaaagcgacgtagtgggaactttggcagctttgcgacgggcagtcccttgaagcgcagtgacgggatcatgaatttggaccaagcgtcgcgaggcagcccttctgcaaaacgacgcagcgtgcacacttccaatttctccgccgaatttagcattttcgacaacgaagtcgagaacaccaccccagagggatctccgacgcgcaacgaaattccctctttccccacgcctgtccagccccacagtccatttgcgaccattcctaagcgctcatcttctctacgacggtcgactctgcagcagcgcggcgatcgacctctctttggacggccaagggctttggatgattcgaccgacgcatcaccacctgagacgccattgtcggttaggacgcgaacgtcatttgatagcagcctattccagccaggcagcgagaacattttctcgcctaagccgccagccagccctcttttctccaactccttcgccaaccctcccgtcaaccccactgtcaacgctactcaaccccctcgacccactgctcacccactctctcgtaccatcactcagtcctcctctgggtcgagtatcgaggactcgcccacacatcaacctgtccacaagcccgaaggccggcgaacaatgttcaacttctccaaatctctccccgcgggggctactcgtccagcccccgtaactcggctcacaggagaagacacagaaacctttgcgaccccagataacttcaggctagtgaagcctctacccgcggcattcatgtccactggtcttatttccaagaaaaaccgcaatgcagaggaaaatctcgcattcaacaagagcatgcccgatacaccatgcaaacggcctgtcaaccttttcaccgctgggacaaaccccccggaccgattattcgacaagtcacgtctggttcatcaatcagacgccgtttccgtctctccatttaacccacctactacctcgcgtcccaagccaagtcccttcgctcggggcatgggaatattcggcagcagcttcaataggcctgagacctcgcggcgtgggagtttcgctagcattgatggcgatgaattgattcttgcccaatcgccctcttcccgacacgacagccagcctccaaatgatgacttccctcccacaccgaccaaacagcctttcctcccctctcgcacctaccctcccgccacttctcaaatccaatctctagagcgactatccgagacagcgagtccgctgcacgagaagcttatgcaggcatcacctcacactccccgcgaccagtacttccctcccgacccgagtgggttatcgatatccgtgcccagtgaccatcagtatgtgcaggagcatgatcttcctgccactccaaccggaccgcgagactcctggtcatcattcagaaggcccagtctccaaattagcggctaccatgttccagatgtcgaccccactttgacatcccgctttgacagcgtggagcttattggaactggcgagttctctcaggtattccgtgtcgcgcagcctcatgacgcgtccttcccatctgtcttctctcttccatcaagtgaaccaaggtcgccaacttctctcccccatcaggtgtgggctgtcaagaagagcaagcagccctatctagggctaaaggatcgcgagcgccgtattcgcgaagtcgaagttctcaaggccttgaccaactgtgaccatgttatttcctttatggacagctgggagaacaatggccatctgtacattcaaacagagttctgcgaagagggtagcctggatggcttcttggcacaagccggtctcaaggcccgactcgatgactttcgtatctggaagattttgctcgagatgtctctgggactgaagcagatacatgacaagggattcatccatcttgacctcaaacctgctaacattctggtcacctttgagggtactttaaagattggtgactttggcatggcgacacgctggcctgcagaggatggtattgaaggcgaaggagaccgcgaatacattggaccggagattcttatgggccgatttgacaaacccgctgatattttctcacttggtctcatcatttttgagatcgccggcaatgtggaactccctgacaatggggtatcttggcagaagctccgcaacggcgatatgagcgatgtgcccagccttacctggagctcggagaccagcatcttccgcgatgcatctggaaatcctatctcggaagggtcatctttcgaggacctttgtacatccgatctgggtgacaacgaattcggcgatgatttcctgacaagtcgtcaattgagcaaccccaaaccacaacgactcgcacgaagcggggagttgattgatccacccagcttcatggttgatgccagccacccacaggcattggacggaattgttcgatggatgatatcccctgagcctcagaaccgtcccacggctgaccaaatcctggaaacttatggagtgcaatttattaatcaacgacgccgcgctggcgccaccgtcttcgagggtaactggggccccgctgacgagatcttggccgaagatgccgaaatgatcgacgtgtaatttaatatcccttttactcttgtgcatacggagggcgttcctgcttgtttctctgcccttcttttttttcttttgtcacctcttcccggtgttcgacctgggccattttccttttcctttttttttttgtcccatctttgatgccatgttttcacgtcacgacatcattcccccatccatcctatgcttcaatggttgaggctggggttttctattgcgggctggggcgttattgatccatcaggtttggatctgggcgttaccttgagcagttcacggataccacaactggagtttgcgaagggtttataaccctgtttcacggatcttttttttttcttttgtacgattcgatacctagcgttacgagatgccagaaatgtaccaacctcacaggatgcttgcttctggaaatggtcaaggtcactctggcattctgctgtattcgttccaacatatctcttatcgtcttgtccttgggagtcaatcgctccgaggcgacaattctttccagggctgatatctggtcggatggcatgcttagttggcttggaaacgtcactgctatctttgctcttttcttttgccttttctaatgatcaatgtgtgccctctgggcagtgatgaccccctatccattttctttgagcgtgatcttctctgctagtttggtgtctttggttgaacacctgggttccatgtctgtgtagtagtaactgcaatgacgaactgaaatgatatcctacgagcatcttgcttcaattgtatagtttattcccaatcaaagtataactaccgttagttatctatacctatggttagtcgtattacaagacaataacttcattgtctcgtagactggcgttcaagccttaatatccgatattcaggcaagccgacattaaaaccaatgaggatatgtgatgtgaataccttctggcaagaatgcctctcaatggatgtcgcttcagctcgatacaatcaatcagttgcctaaagaaattcggggaacaatacactatatccttttttaaggccattacacgctggttacttcatagctcgctgtattttatcctacccactatatttaattccataagattacgtgggagtacgggggtcttatattcaagacaaaactatgatttatcttcatcttttgtctgtacagcgcacgttgtatactcccaagcccaaaatatatttcggattgccacgggatttcttggcatttggcgcaaacttctccaacttcttgttccaaaccatctttaacctcgaaacttggcaccctgctctgcaagtctccctttccctggtattgagcttgacttattggatctctacactttgtgcaacatgcgccgctgtctccaagaccccgactcacaataaccgcaccttacctccacctcaagaagctccgccctgcacatcaacttctttttagttttctctctcccataataacagcccatatcacgcaccatggacaataaagatttcgtgtcggaaaatcttttccgcctaacgggcgcgtcagagcccaccgtaatcgactttgtactcgcgaccgccagctcagccaagtcgacctcctccctccaagataccctgacgtccttcctggatggcatagatgccagcgaaattggtgcctttgctcgagagctccatgcccgcatggggaagggcgcacagtccagcgcctctgcctccaaacccgcaacgagcaaggaatccacgaaaaagaagtaccgtctggtagacatgggcgaagaccaaccagaacccgccccatcgctaggaccgaccaacgtcgaggcagaccgagagcgacggaaaagacgggacagagacagcgacaaggataggagcagcagcaagcgagactccgagcctcggagtcgcggggagaaggacgacagccgaaagcgagaccgaagccgcgatgcagagagccgcgaccggccacggatgaggaagctccgcaagaagggctctcaggacttcgacgatcgatggggcgacgaagagatcctcgaacagattgtcgaaaacgagatttacccgaaggaattcgaagagtcccccccaaagcgcacacgactcgatgatggctctgcgtctcccaatcccgcgtcactggccgacgatatcgatatcgaccctgagaccaagcaagagatcgaccgccaacgagatctccgtgaacgagacgagtttgccaaacgactagctaataaggaaagtagcaagtcgaagaagattgttgaggatcggacgcgcgacggcgaggctgcacggcgacgtgcgctgggcgatgatgccagcgcacgggcttcgatgatgcccgatctgcgagaacgatctcgacaggaatacttgaagaagcgcgaggcagaacggttagcactactgcgacgacaggttatagaggaggccgcggagttgcgtgaaaaccccaatctgtctcgcaaggagaaggaggagttcgcgcgcaatcgagaggtccttcgtctcgccgaggaacggcttcggatcgacgatcaccgtgatggctatcagatgccatccgactatattacggaaaaggggaaaatcgatcggaagaaaaaggaagaggctctgtacaagcggtacgtcgagcgtgatgagctgggccaggagcgattcgtcacagagcacgaggagtgggagctggagcaggcggccaaggccaaggcacagatcaaaaaggccgagttcgtcgatgagggagactatgagtacgtcttcgatgattcgcagcagatcaactttgttatggacgccaaactcgagggcacgcaaaagccaatgacgcaggagcagctgcggttcaaggagcaggtcgatgcagcagagaagaaagccctctcgatggaggaaacccgcaaaagtttgcccatctatcaattccgtgatcagatcatccaggctgtggcagagcatcaagttttaattatcgtcggtgaaactggttccggaaagaccacacagatcccacaatacctccatgaagccggctacaccaaggatggcctcaagattggttgcacgcagccgcgacgagtggctgccatgagtgttgctgctcgtgtggcggatgaaatgggtacgaagatcggaaatgaagttggttatgccatccgatttgaggacaataccagcgacaagaccattcttaagtatatgaccgatggaatgttgctacgagaactgttaacagagccggacctgagccagtacgcagccttgatgattgacgaggcgcacgaacgaacggtgcccaccgatatcgcttgtggtctgctcaaggatattgcgaaagctcgacctgatctgaagctgctaatttcttcggcgacgatggatgcccagaagttccagaagtatttcgacgatgcgcccattttcaatattcctggtcgccgataccctgtcgacgtgcactacacttcacaacctgaagccaactacctcgccgcagccattacaacggtcttccagatccatgtcacgcaaggccctggagatattttggtcttcttgactggacaagaggaaatcgaggccgccgagcaaagcttacaggaaacggctcgaaaacttgggagtaagattccggagatgattattgctcctatctacgccaacctgccatctgaactgcagactaagattttcgagccgactccgcctaatgcgcgaaaagtggtgcttgccactaatatcgctgaaactagtttgaccatcgatggtattgtctacgtgattgatcccggatttgtcaaggagaacgtgttcaatccacgcagtggaatggaaagcttggtcgtgacgccgtgttcgcgtgcctcggccaaccagcgagccggacgtgctgggcgtgtcggcccgggcaagtgtttccgcctgtataccaagtgggcgtactataacgaactggaagagaacactaccccggagatccaacgtaccaacttgaacggtgtgattctgatgttgaagtcgctgggaatcgaccaactactcgactttgactttatggaccctccgccggcggagaccatcatccgcgctctagagcaactgtatgcgctcggggcactcaacgaccgaggcgagctgaccaaggtcggccggcagatggccgagttcccaacggacccgatgctcgccaaggcgatccttgccgccgacaaatacggatgcgtagaagaagtgctgtcgatcgtgtcgatgctcggcgaaggcagcgcactcttcttccgacccaaggataagaagatccatgcggacagtgcgcgcaatcgcttcaccatcaaagaaggcggtgaccatttgacgctactgaacgtctggaaccaatgggtcgactcggactttagcataatctgggcgaaagagaacttcctgcagcagcgcagtctgacgcgggcgcgcgatgtgcgcgatcagcttgccaaactgtgcgaccgtgtcgaggtggctgtcagtacctgtgggtctacgaatatccagccaatccagaaggccatcacggctgggttcttccccaatgcggcgcgactccagcgtggcggtgacagttaccgcactatcaagaatggacagtcggtatacttgcatccgtctagtacacttatggagattaaccctcgctgggtcatctacttcgagttagtgcttaccagcaaggagtacatgcgcagtaatatgccgctgcagccagagtggctggtagaggttgcgccgcattactataagaagaaggatttggagagtctagggttggatcgcaaggtaacgaaggggcagggggcggctggagagaagagtcgagagtagaacggataatgtagttgaatagcctcatataaaatagacacctcaggcactcatcttccaaccaatcaccgtccagataattcaaaccgcggcaaatcaaccgaacctcggtttctccgctttcccccagacttccaaggcctctccgaattttatacgtcacgtcagttactgatttcccctttttctctctcaacttctcaatctacatcctacctcaaaatgtctaaaacattcacccctgctgaagtggccaaccacaagactgccgataagggcctctacatcatcatcgacagcaatgttttcgatgtaaccaactttgtcgacgagcaccccggcggcgcaaagattcttaagcgtgtagcgggcaaggatgcctcgaagcagttctggaaagtatgtattctcttctttcttctttcttttcttcttgtttctctttaaaaccaaaatgttatatattgttatgatcggctatcgttcgagtcggctatcgttcgagtcggctattgaaagtatgtaactaacgccgtttagtatcacaacgaatccgtgctgaagaagtactcacccaagctaaaggtcggcggagtcaaggatgctgcgaagctgtgaatattctattggaaaatgaaggaaatgatatacttcagtgttttggtttgggaggataagcccactgcgggaaaccccgatcagctgcacatcacataaatgtcacgatgttgtatttactccgctagcgaacgttatacccgtgattcctgtctgattattttgctctgtgaatatcaacttactacccggggcatgaatagaacagaatagaccaatataggaggttggaggttggtacatacagaaaggcttcattcttgctcataaccaagtcttatacattatgttcaaatataaacacgaagatcaatacctatatatctaggatctgctgggttgatagttggaatgtcaaaaaaataaacgcccttctccctcccgctgcacgagcaatagtatccgaatcaaagtggtatcaactcgaaaacgacaaatggtaaatgacaggtaatagatgtgtgaggtgagtaaagcagagaataaatatgaataggtgacggtgacaaaatagaagatatgtgcagtgaagatgtacgcagacaagccacggagagacatggcgatgaacctgcgccaaaaaggtgtgttgttgaaagaaagaaggagtaggtatatgataagtagtaagtaatgggcaaaaggtagagagagcgcatgtgaaactcatccactgtagaattagaaaccccgccacggatcatcaggacggtatgagaactcgctgccatggaccgaaggcgtgtcaaactcataccgtctctcactccactgactggatgtcttgcggacatggcgctggcgcggaggcgcacgaggacgattaatctgttctgcgtggcggtcgatgaaagcctccatacgcacagtgcctatgtcaaacatgttgctgccagccccactggaagcacggccactcgcctcggaagtgcgtcggctgatactgctacgacgacttccaatgcctggaggtggggctgggggctgcatggcggggaaatgtagctccgacgagccggccgtggtgccgctgtgtgaagaaggcatagtaccggcgctggagaagctgcggagagcgtggagagctgggggacggggcgcggtgttgctgcgtttgcggctgtgggttgagaaacggggaacgtggggtgcgtcggctgctaggtcgatgctgccccctgggatttcggggactggagccggagcaccggcactgttgaaggagcgtttgtcctttggcactgggcggggacggccctttgcgacccgaatggagtcgcgaattgggtttcggcggagggaggcttgaggtggggttggcgattcttcttgtgggactggaggtagagctgctaattcttggaggccgattgcggaatggctgaggaaggatagggctgttagccaaacgtagtggcgttcgatggttagtgctgtgaatttcagagcacgctgtggtgtcagcaccaggatagagcggttgaatgggatcgaagagccggcgcctttgggtatggggttgtcgtctttgacgtccaagacggattgaatcgtgactataccgaggcgagatactatgttagttgccactccaaccaaatcgaatgagttccttaaagacttacacttccggccacttttgccgagtaatgcaggcccactcgtaggctgtttactactccacataatggagccttcgtacggggcgagccaaacccatcgtttatgtcgcacaccactgttcgtaatattcgccgacacatcgtcagggttcttgccctcccaagtctctttggactcgcccatcccaaatgatttgcgtcgacggacgtatttgaacatccactcgccaaccatagtctgagcaatagcatcaacgacgctagttggctgcacaccaccggtggaatcctttctatcgcactgttcatggttccaggtttgggatggagtcgtgcgatgcgagatgcgtttcgatggcccgtaccgctcacgaggtgctgtgatctcatcacacggcattggcggtggccgatatggtcggtatgcggggctttctggggaaaacgttgcggtcgatcgtgacggggaagaaagtgtttctggtctctcggtaatatccgactgtgacgttgctgctgcggatcgcactcggcggagagttgggcgccggacgacagattggcgaccacggtccgagaactgtctggcggctgagcgagtaggacttggaggcccgtcgctaccgttcagcggaaggttgcgtgagctgagacggatgggtacagggaatggcggtgcgatgcttgagcctgtactgccgctctcgaggcttggttcactgggactgcgggcacggggtttctggtgcgcggcggttccgctggaaatcatggctaatttgcgcatgccgggctggcgaatactggtcataccagaccgctgggaagcccgagaacggccaatattgggtggtcttgactccggggaagatagctgctcgtcgatctcggggagaggcatgccgtccaagctaggtcttgatttcgaagtgatgagcttgccacgactgacagtgtatgcggcaaaagggcggttaaggagctcatcgtcggtgaagacatcgcgttcgccatgcgggccttcgtcatcgctgttattctcaaagccggcgaagagactgcttgaacgtagaggccgtcgaatattggacaaggtatcatctgagagcggaccattatcgttgttaccggggtacgcctgcacatgatctggaccaggtgctctaggaggcttcacgggatgatctgtcggctgatctgttatcagacgtctctgctttcgtttctcggaccgtggcggaaccgggggcacagtgcaaaactcgaggctaggctcttcgggttcagggagaggtagtgcatcttgaatagcagaaggaagaagactggcaggaagtctgacagggcgttgatcgaaacggatttcctcggtttggatggcgacggatcggcaatcagcaattgcccggaagttggcctggcaagcgatgttcttggtctgcggtggaagaacgacactatttcgaggtgaggatggctctgagcctggtgggtggatagcgatcattggaatgtccatcttggatgaggcattgggggacaggttttcgctttgagcaacacatggttccggaacgacatcagtctgggtggatgccgatttcatttgcaccggctccggggtggactcgacaggctgaggcgagtcagccacattcggcgtccatggaggacttgggagttcatccacggtctgacaagaattagaaaccatctgaggtgcaactgggagcgtggcgctgtcattcgttctaggtattttcgttttctggtcgtcttctttctcgggctctgagacggtttccatgggctcaggaacaatgtcgtatacaaccttcccttctagcgtaggcgacggaggaggtgagtactggatgccgatatcgcggtattcaactgccgggtcaagtttcactgggctagcaagcccgagttcccgtgcacggaactccagggcagtgggtgagtataagtccgagctctgcagggaaagacctaggatcttcctggccttgaaagaaacactatgcgacccctgtgagtgaaccgacattgggcgttcttcgggcagcgcctccggagaggaaggcagctcatcatcagatgggacaaactcatcctcatcctcttcctcgaagtcgagttcctccgccaggttcaaacctgaaccattcttgcttccaggcgcgatactcataactgagtaccgcacgttatggaatatgaccgcctcttcaccttcttctgagctcaaggtggtcacgctcgtgcgtcggcggcctaggctactagatgccacactggctgagtcgctttctttattcttgtcatgaatatggtcactattctcactcggttgtgaacgcgagcggatagtcaccacttcctgggcggctgcgacctcgttcaaaacggtcttcaagcggccctctactacgtgaatcttgcgttccagggctcggcgttcatccgcccaggagtcttggtcgcgactccagagtaattgagttcgttcgacgtcctcctcccgacttcgggcttttttctgtgcctgctcgagccttttacgaacatcgccgatgttctcgaccgcttcatcgcgctcccgagctagctcggccatcgcagatgacgttccaccttccaatagttggatttgatgtttcaacgagcgcccttcccaggtcgcctgggacagattcgtggtcagtgtttcattttcagtccttgattcgtccaagctctcttctaacccatcgattgccttggttttgttctctatctcccgccgtagcgagagaatctccgatacgagagatgcatggagagtgggtgtgatcctccgcgggtcgaagggggatagggtatcctcggtgatatcgatatcatcttcgtctgtttgtccgtcgggggagaatgcgggggttgggaggccagatggggaggaaggtgtcggggaggaatctcgccggcgcaaggacggtctcgatctcgatctcgatcctcctttggatggagctcgagatctggatctaaaggatggcgccggggaggggtgggccatggaaggcggccactgtaaatcggccatctctctttgtgaatgtgccggatgaaccgcctcaaaccatcgaggctctgctccttgggctaaccagagcacttcacgcactggatcccatcaaaagactaccgtagttcaaccatccgactattgactgctttgaagccggcgcttgtctctctccagagacaggttttcgctcggtgcaatcgactggtcgaacgcgggatggaggggaaattcaacgctgggacttttgacacttggtggaacgaagaggtcagccacggttacaatgaagatgtgtaagatgcacgcttgagcgcaatgccgatatttggatatgcacgggaagagaggccccctaactctacttacggagtactccagtgacaaacaggtctgaccgttttagcttaagagaggaggaagatgtcaatcgggaggtatggcccgattccgggagggaaaatagatcaacccgaaggatgcgagggccgatcgcgattatagaatcccctgagatccagtactctgtagatttacgccgtacggagtacttacgaaggtaatgacctgggaggagtcggggcttagaccattaaaagaccttaggggattagatcagccttgcggcatgcctgcgcatatcggaaacacggacgcgaggagagtcttggacttctaaaaaagaaagaaaaaagtcccaggggcgttcgttagggggcatatggggaaagaaaagaatccacccgattagcccacaggattgaatactccactgcagctgccagacactaagacagatgagcttcagtcaatatcccctgtataaaacgctttcagggtctgttcgcgcgagagagaatcaccagagtgtatggagtatacttggtattgtggtagatctcaaaggtcatggagaagctgtttatttggagacaaagaaacgaggaaaggtaaaaaaagagataaaaacggggccgtattctcaagagaatgagctattgatcagaaggtcggaaagcctggaaaaggaatatgagtgtactccgtacggagtaagattcatagattaactgcctggggtatgttgtaggagttcgtgacagaactccactgcgtgtctgggccatgaagctcaagcacttttttgacctgggaagatcaccccctattttgtttggcgaaatcatggaaggcaaaccataaaaataagaaaagcctttgcaatgaccaatagtttcgattccaaagacactaaaatagcaaaggttagcgtgtttgataaattaaatggctgtgttggcggccaattcgtagctcgtttgggcgacgatcgccgtacgcaatttcgcagagcctagtctggtttcagagtttccagggtgtatgtgtcgcatatgttgcacgtaacctgtcgcacgttgcatgttgtgtagtattggttcctttttgtgatgattatctctagacagtcaaatagtcaagaatcgaagcatctcggacattatcgcggatcaggggtaaaaaaacagacccatccaaggtctccaccgagagcttcgaagaacgaggaacccacattggccgaaatgaagaaccagacattcatccggacttcacaccacaatggatgtacgcgacactctatggcctccatggcctcggtctgtttctcttgcatatgtcgatgcaagtgccggtcgcacagctagcaaacgtcagaggtggcgtatgagaatcgccaatgattggcaataaatgctttattatcgtatccaatggacgaagtaggtacggagtcatgtctagactctgaatgtcaagcccccaaattgccattggaaatcagactagcagcggggtttgacacgaagtattaaggaatctccgcgaaccatttccacccatttgccccactgacctcaggggacgggacgccgggtactttttgacttggacgagggccgttgacaggtcgatattcgctgatatttcacattcctggtcggtttctttgtctgacagtgctagtggtgagtctagattggaggcgcagacaatacacggaagggctgaagctgtgtgcaaagtacttcgtatgtactccgtagggaaggtcacttataatagaagatcgtcgaattgaacaatagtcgtgatgattagcttgagaatgtcgagagcattgaaagaaggcggaaaaagaataggcagaatgttctgtgccaccttttttaagatctcgaagactcaacacataaaatactccaacttcttacaatgcatgtttcgagacaagtctctgagaactgattccctttccctttctccaataagatccgccagaacaatccggccgttagatctagagatgcgattaaccgggctgactaagcctatttgcgtcattccctggacatcggcatatatagacttatgttgtacatgtacatatatccagctgcgatctcaactttgttaatatcccacctggacagacatcggaaaccgacataatctcgaaagtgcggggaacagctgcatatcaccatcatcatccaacaccaactacataaaatgtcgacagacaacccgccccagatgttatttttcgatatgtttggcacagtagtttcgtggcgtacatgcgtcacggaagagctgagtgtggctgccgtacatattgttaattatcccagcaaggacctcccagccgacttgcgggaccgtgctgcggccatgaccagtgacgactggctggcttttgtcgcagaatggcggcagacttacaatgtgttcactagtacatttgacacatccgaaaagtttatgtccgtcgaccagcaccactacaatgcgcttcaggtcctcttgcggcagcgcggtctggagggcctgttcactgacgagaagctgtgggaactctctttcgcgtggcaccggctcaacccttggccggatagtgtgaaaggtcttgagttgttgaaccggcgctttgccacttctaccctgtcgaatgggaatgtctctttactgcaggacctccaacgtcatggatcactgcctttcacgcaacttgttagtgcggagaactttggggcttacaagccttctccattggtttataagggtgctgccaggaagtttggactggagccaggccagtgcggaatggttgcagcgcatctgcgcgatttgaaggctgccaagagctgtgggtttcagactatctatgttgagcgtgagctagaggaagagatgtcacaggagcaggctgcgaacgccaagactggcgggtacgtggatatgtggattgatcttgagtctgatggcttccgagaggtggctaggcgatttggggttgagtaagaccggtctaccctctggtctggggctagtagttgagactggttccggtggacaacgtgtatatttggacaatttgaatgaatactcgaaatataatcggtccatttagcccatcctccattccgacatgtattttgcctctcccatcgcctcattccaaatcccccaacatcaagcccaaaggatattcaattttcgccacccagtagctggagaaggtataggttctggattttcattcgcgatgtgaagaaattcgcggattggaatttcttccagtgggacaagccgggtctttcgccaaaatttgcacccaaaatatagggcaaatataagcggaatattgaagtatgacgatacaaagatctgagaactccaattgccctcaataaacacatggaatccacccgtgagcagaattatactgaaagaaaccagagaaatccatgccgcatagggttgaaatgggctttgccaaggaagttcagtacggctaatcttttgcttcttacagccataaaaaaacctcaaatagatcacctctatattgatccaatgcaccaaagaggcagctgagaccagttgctggagccaatcaaatacaacagaagctgcggatgatagcgtcatataccccaaggcaagaaaagatccgactgcggcaaccgatatccaaggaaccccgaagcgattgatgcgagtgaataattctggggcatgcccctcttgagcaagtccatatagtgtcctggttcccacgagcatggctgtatttgggtaagcagaagtacagcagccaatggaaaaatgcatactcaccagaattaccagcgctccatgcacttgtgacaacgacagcattgatgatcgaaggtaccactttgatcccgacattagtggcagcaatcgcgaacggagacgctccagcatccccggaatttgacagcaaccccttatcattggaggggacaataaggcccatcatgaaaatggtgatcagataaaatatcaggattctccagaacacacgtttggcggccttggggatgttatgccgaggattctgtgtctcagctgctgcaaccgatatattctcgacgttggaaaatgcataggctgcactactcaagacacgccaaaacccaaggaaccgtccccatgagccgttgattccgagaaactgcacaaagggtccagggtctcgccaaaatcgaaaccccatgggataaccccgtggacctgcgccagaggtaatgcatacactctatggaaatcagtcaggaactaaccagaatattgctcgagatctgctcaccatgatattcacaccaacaatcagagcaatcttcaacattgcaaaaacaaactccaactcgccgtaaatactgaccaacagcatattactaacgatcagcagtgcgccaagggcgctaatccatactgcatggttaatatcagaccaaaagtcgatgatgacagcgcaagccaccatttcagccggcagcaggatagcatttgcataaacactattccagccttgtgcaaacgccagagcagggtcaacgaaccattcggcgtgtcttatgataccaccggaaagaggcgccagagcactgagctcagccacggaaaagaccacgcagcatataagcatacccacaatgcaatatgccagcaacatgcttagcggtccaccccttgctaaggattttccggtcgctaggaagaggccagtaccgatggtcccggccagggctatcatttgaatatgacgttgtttcagccctcgtcttgtttgaacgagctcggaaatgactgcctgtgttttagggttgtcttcacccgcgaaggtacgtttgaggagaggtatggcctcattttcactggtaatctcttcattttgctctgagtgctgagaatgactgttcatttcaaatgatcggatgggaggggcaaatgaataaaagaggacaactaaaagggtgaagaggggttaaattgagaagtgttcttaggcatgtgtgtggttggatggtgataagttaagaagaacttatattgaagtcgtgacaagaggatgtttcttattggtgcatgacctgcagccccggcccggttgatattgccggcaccaaaaatggaagataaaggatatatcaccttttctttcttcctcgatataatcttctatcctactttccgctttggcttttcggaacctaggccaagaataatcttagtagaatcgccggagtcggtaacattgaattattatatgtaccgtgctgaagacagtcgtctcgaggcaggacagagagtagtgtggccgtattcctattggtaaaatgccgagtaggagagttaatgaatctggaatattctctttattaggaatataactacctagaggcgctcctatgatagctttaatattataagagtataagctttatattatttatagttagttttaaaaatactgctaaattccactctttccttactatctaatctcaggcagtggcttactataccctattcttatactatcggataatctcctttattatcactcacttttcactcacttttcacaccctccgcacaactatcgtataaatataccttcatcgctaaaccatcgagtctgcactgcgggactaccaggcatgtataccatcttcgattgatactaggagaccttaatctcgcaccccaaacattcaagttccacctagagagcactagagccgaattgctagcgaaagatcttaattcaaacaagatggcctccaagcctcaggactcaccctcttggatcactgaagatggtagcccactctgcggattctactggatgagaatcgatccgaaagtgcagcctaattactgggtgtaagcatgttttccctaggtcctttggtggatatttgctcacgcataaattctgaagccaacctaagaaattgtgcgaatgctgggagcacttcccaacccagtggccggttgaccatgtgatgatcgtgagaattctaaatcaagtcgccctaagaggtaacctttccatgactgactcttgtcggtctatcaaagcaaatccctgcatgtgccttcaggtgcccatattacacggcactcgataacgtggaaaaggagggacgaccttgcccggtacgggtgaaaagacatatcaacgcagcgcatatcgtgagtactccagtatacttacccagggaatgacgctcatatcacttagagaagacaaagagacttctataagggactacagatttcctgtaagtgtgcctcaaagtcgaaagaagtctatgcatactgacctttgctgtctttagtttcaggttgcttccagtccgatgccatctcaactcgcagtgaagaggaagtcccgtccgagagcccacatttacaatgtgcatgagaacaggtcgccatagttatcttatgaaccggctgaaaggacacatgaacaatgaaaaattgaaccctcaatgaagcccagagtctagacctctattgcagggcttggttttattcaacatgatactggcacccacgagggcaataagtgcaatgagaagataggggcgtatgataagaaatatttatcactcggataccagcgggacttcttggttagtttctaggtaaacggagtggacgaggattccaaaggcgtgtctgttgtatcgacgaagaccctgcgatcaaatttggtcactcagcctatgcttactggcttgctctatttcggcgatataagatgagtgtttattgactttattgtctaacgagttgatgctgagattctgcagttgaataagaccagcataaaccccttgcttgaccataagttcagtatgattcccttcttccaccgcccatcatggtggttttatcatctttgttatactagaaagacgatgtgcaatcgagatcatgtctccttcagagcacggccgcgagaatttccttctcgctactggagtcgagggaaactgtagctatattaagcccaaaatcccttcaagtccttgagtagagctcacgcgaccgagtttcgttgcttttggctgtctctcacaacattccgttggagcccacgatagtaccgactcagagagccgataaacagtgctgtgtctgtatttcatttctatgagcctgtacaggcttgagtacatattagctacctcgtgttataatagctactttcttttgtttctgtttcacattggttagatgctgttatagggatgatcaacccaagcgaagtagtatcgaagtcaaacgccgatatcggaaaatgccaatataataccaataatacacactagtaaaatatatccaagccctaactcccatcttaccgctcttcgcgaagccggtatcggaacatcgtcgttgcagctccttatctgatctcttatcagatctgacgcacattgccaaactagtctgcacctgggtattggtaccacctgcagcacacaatatctcgtaatgcaactgaaaattctcactccaccggcccagggagaacccggcgtgctccaccactgtgtacatcacccacccacccccatagccaagtcattcataccctaacgccacctcgcagaccaaatccctcgtcgccttcgaatatacccgcagccatgtacccaagccacacaccctcatctttgtcggcggactaggtgacaccctcgggtcagtcgactatctcagcgacgtagtccgagcgctagacccatcgcaatggagcgtattctcgctgatcctatcctgcgccggcggcgggtggggcatgggccgactgggcaaagacattgatgagctatcacagtgcgtctcatacgtccgaaaatataaggagccccaattcggcgtcggaaaggtggtcatcatgggccattcgaccggcagccaggacgtgatgcactatattaactgtcccaacccacggccagcacaccctgtcttcgaccgccactggaagccgattgtgcgggtgccagttgatggggcgattatgcaagcgccggtttctgaccgcgagggcatattgtgggttgtgaaatgtggcactgcgcgtgatagcccggccaaaatgcgcgcgatgtacaataaggctgttgctgatgcgcggcgggcgatgtatgaggatcacgatcttgttgatacggttgtaccattgagtgtgacgtcgcggattgggtatccgccctctgcgccggttagcagtcggcgtttcttgagtctggctagcccagatagtccggaggatccgtctgaggatgatttgtttagttccgacttaagtgatgagcggttccgtgcgacatttgggacgattcgggagagagccttgctgaggcagaaaatgctggtgctgtactctggaagggatcaatcggtgccgccatgggttaataaagaagccctattgaagaggtggcagattgctgctgatgggagtgggcggcaggtctgggattcaaggagtatggttattcctaatgcatcgcatgcgctgagtgatagcgatcaagcggagccgcggcggattttggtggagagggtgacggcttatttgaatgacattcagcgaggatgatttccgccgaattggtgagattgtatgatatttaagcaaaatatatttgatcctcatatgaaagagttctcagaatccgggaggtcaagaccaacgaaatagttcaaaacaactctaccctgtaagtgaataaataacggtacctgcactggtgaattccgggctaaagacatcgactgtaagcctaaggcggctgctagttgtaccgaagatagctctagtagtctagtcagaccagccttgatatagtcaacttctactgcgaccagttattgtgcaactatctgcatgatgccgcaccaccacactagtactataaactatggcgaattgaatgaggacactattattgatatcgactccgatatagctgacgatgaagcgcggccacctatcttaatgacgatcttgacagcttttaaatatggtatgcctctattcttacccaccacagtagtcagtctaaagcggttaggaacggcagaaatctcataacaatcctattcttattccactaccgaggctgaagactaaaacggcaataagattacaataatcctacatgtttatagcttaagccttttggccacatggcttcctcccctttctccacaaatattgatacatactatctattattgagccttgacacgctcacatgatgttgaactagtcccaccagcatcgttgatccaatcaatagcgtaacgggaggatcatattattgaccccaacacgttttaaaggcatatcgtcggggatctttcgggcacttggcacattgagatcgacatctactgtgtctacaatactccgtatacagtgtgcaatatacgcatgtgatcggaacaaccttggaaagatggacaaccccctcgagcagtatttaagtcacggatcaatattgaagatcccccaagccaagatcgggccgcaaggaataattttgaaatgtcacatcgagtccatttccaagaatcaattagtttcccaagggccaatctgctgggaaccgccctgccgatcgctggaagccgcaacgcacgacggatgcaacacatccacaaaccaatgacagatatattgcagattcaggggatatgaccaagagccgttgcatcatgcacgtcaacacaaggcaggtgcaaaccgaatcccgtcaccggtactcctgagccgatatgaacaatatgctcgagattagaatcctagaccagggcgagaccatagcggatcgttgaacggcacaaattcagcgttccccatataacggccaggcgggaggagccgttgaccaaccaacccctgccccttcaatgaaatgcacggctactgatggtcccacggaaagagctcccccttacggagtagcatggcaactgagccgttggcccgggccattccgtgtgaacagggggatgaaaccatcctaggacgtgccctagcaagttttgatctttaaatgctatgaatatgctgatatgagaatctaaaatataactgcagtttagggttcttctcttgaaagttgaccggaagaggccgagccgggatgtacttctttcagagaaagagaaggagaaagaactggttccgcccgggcccggcctattgcattcaaccaaaaaagtggacggaaacagtttccccgatataactcctcccctggcccgcggccacagaactgggacgggaaaagggagccattccggatcctacgagttgatgcccaaccagttgcctactagggaaatagagcagcagatttgttcgatgaaaagtaagaaaaattaaaataaaattcaagccaagcaaattcaaaaaaaaaaagaactcatacaacaggagtacatagtacatacccaccttccgaacttcctcccgttgtcttcttgcccacctttgtagctagcaaggcccctaggacgatctatgtatcaatggggacacttttttttttttacgcgcccctccacgggtggacattgcaatggcatgaagactttgacattcaccggtgactataggctatttgaacctattggccagatcttaggttgtataccggatgcatgcgcaagagcggaaaaatgacagtgacaggggtcgaatggacagggggtataacgtggaagggacgataacgagagccaatctaaggtggccatgagccatgactcgatcctgaactagttcgaggttggcgttgaacagtcacagagatggatgttccggaatcccaaatccacattcatttgacttacgctattcgggtagcgtctcccagggccatggagagagggagacttttgttccagggtgttataattgtaaggggagtatggagtacggatactttgatagtacgaactcccacgtttcaaaaaccacgagggagatggggacatcgtgtgccaccatcgacactaatttaattaatcccattctaattgcaggacttgagatagtatgtacaacataaagagaacatcccatgcataataaataatacatcttcatggtagggcagtgaaaccatagatcgtgcccccccacgtgtagattggggtacacagtgccttagtttgagctgtacctagacgaaccggcccaaattgttaaattcaaaacaagaagaaaagaaaaataagaagctctcagcttctgccggcagggaaatgagcttcagccaagttacggagtacggagtacatccgggattatccactgtgccctgtgcgcttctccttttcactgtggacctttgggacctgggctttttctctcttttctgttcttctttctttgggttataactttttttggggtatatatgggtatcttctggctcattttctccgagatcgtcggatccggtgtaggttcagtggaatgggcgtccagttccagagatcttcggatggacggagtatatagatggctttttggggtatattaagataatgaaagggtgaacagaagaccccaaggtaaatatataaaaagaatgaataaatgaatgagtatcagcacagccctagaaacactatgtggatatttagaaaatgtgaaagaaaatgtatgacttcatggagctgtcacttgggctttttctccctaattataagattcctaccagtcagaatgaactctccgatgtctttatttttcatgtccttttataggtctagctctgattcatttttttcctttccacatccgaaacggtctcagagttagcgatgtagagaataacgaacgggggatagggatctcgggagaagtacaaaatccattctctttcataaatttggtatttttatcttctattctgttcgatatcctgttcgacatttctctttccttaatattctctatactctaattctaatctcctaatatcctcatatccctttcccttgaacccctctctccacttcgttccagcccccggaccagacttcgcacactggtcttccccctctctctctcttgtctctcggctctcccttctcttttctctaattccattttctctcttcccttcgctctatatctccccctttgcatcattcttccggcaacaattgggggttgctgtgaatcgcgtggaagctcccgcttttctttttcgcccccccgcctggaacgtgggccacttcactcacctttcccccctccttgcgacttcgaacatccccccctctttcccctgaaataattataggtatgtcgtggacaagacggtatcgctatagacgtactgacttctctaggctgattgtctttgctgtttcttgttctcagttccagttgcccgccatggctggaaaaatgacgttgtacaagctggtggtgttgggagacggaggtgttggaaagaccgcccttactattcaggttggtcgacctagcccttgacctctgggcaacaattcttcatgacccatgactaaaacctatccttctagttgtgtcttaatcactttgtcgaaacatacgatccaaccatcgaggattcatatcgcaaacaagtcgtgatcgatcaacaatcgtgtatgctcgaggtgctggacacagcgggccaggaagaatataccgcgctacgagaccagtggatccgggatggcgaggggtttgtattggtgtatagcatcacatcacgcgcctccttctcccgcatcacaaaattctacaaccaaattaagatggtcaaggaatcgtcaagctccggttccccctccggccccagctacctgaactcgcccatgaccgcctccgcgggtcccgccatgcccgtgcccgtcatgttagtcggaaataagagcgacaaggccgtcgagcgcgcagtctcagcacaggaaggccaagcattggccaaggagctgggatgtgagtttgttgaggcatcggccaagaactgtatcaacgtggagaaggccttctacgacgttgtccgcatgctgcgccagcagcgacaacaggcagcaggtggccgtggcgcagaccgtcgcccaacaggcttcggatcgggccgcgatcgcgacgcaggccccgaatatcccaagtccttccggcctgaccgatcgcgacatcgcagtcggctccagtgtactctcttgtgatcggccgggtccgtccgggaggcgttggatttcttgctcactgaaataatggctgtttcctttttctcttttcctctcttccttttggtcccgggtgcatctggagggtggttctatcttttggttacttcgttcggcgtcggtggtccttgccatgctacatcttttacgctcgcattttgaagagcttgagaaccgacgtggagatttgaggccagtgtctgcaagcctcgagcgcaaattttttcttttttgttttggcttttgttttgttctttcgaaatgcgccgagacatgcagactggctgtctggatttccacaagctccgcttactctttttccttaccaatcgtctctcttcttcggtctctgcttatttgataagttgcgaacggaggaatctttcggacacgccttggagcaccccgacagaaacaaaaaaaaaaaacaccccccaggcaacgaagccagaagatcgcagtcgcgcattagcaggcatttcgatatgataccctacgactgagcttgttttatttgattaatttctcagccatttatgcgatatagacaattgataaaggtcttttttttcagtcggttgtaataatttggaaaatccgaagcaaaagtacacctgagtacaagtgcagtacccgattccaggccgtacttgagacagcgcatgaggtatactccgggtatactctgggtatactctgaggctggggacaagctgagtacagaagaaagtgcggggaaaaagcacggactcgcctcggctgcatccgggggatctcagcttcaccttctccccgcaaatggcgagtcacacacacgaacgcctaaaatgtcttgccgatcagagccttgcaggtcttaccttccatattcccgtgccaatcgcaatattggatccgaaacacctcgggtagaagcgctctatatcagagctcctgagtactattctttgtcttgtatgagctgtttctctcttctcggctcaaatcacaatcccggcaaataacttcgcctcttcatcatttctgtagactgaatccgaaacctatccaacatgtcttcgcaccctcaaccgacaacccactcacattcccttggcgatccagaaaccttttggtcccatcatgcggccagactccactggcaccgcaagccttcacgtgccttgacgcggcagacaaagtctctcccgagcggaaccgagcatgagcactggtcgtggttcgccgatggcgagatctccacaacctacaattgtgtcgaccgacatgtgctcgcaggccacggtgacaatgttgccattgtatgggaatcaccggtaaccggtgtaacggagaagtatacttatgcccgcttactcgatgaggtcgaggttcttgccggtgtacttagggaggaaggggtaaagaagggcgatgttgttattatctacagtatgcaattgtgaccacaccacaagtggagaattgattaaagacagaaacccactgctgactacgtatcggatctagtgccaatgatccctgcggccctagtagctgcgttggcaataacccgcctaggcgcaattcacgccgctgttttcggtggcttcgctccgcaagctctggcacaacgcatcgaggccgcccgcccaaaagttctaatgacagcgtcatgtggaatagaggggtccaagggacccatttcatatcggccactcgtcgaaggcgccgtcaaggcaagcagctttaagccgagcaggatcattgtctggcagcgtgaccaactgcgctgggatcagcccgataagcgcggtggccagcgtaattggcagagactcgttaagagcgcacgattccgtggggttaaggctggacctgttcctgttaagagtacggatgcactttatattatctatacaagtggtgagtgaatcccagaaccgaacccaattcctgatctgttttgttcatacttaaacgtttccacaggaaccaccggcctccccaaaggcgtcctgcgtgaagcaggtgggcacgccgtgggtctggaactctccataaagtcgctcttcgggatcaaaggtcccggcgacacaatgttctgcgcatcagacataggctgggtcgtcggacactcttacatcctttatgcaccgctgttagtcggcgccacaacggtcctgtttgaaggtaagcccgtcggcacgccggatgcagggacattctggcgcattgtcgagaaacacaatgtaaatgccctctttacagcaccaactgccatgcgagctatccggaaagatgatccggacgaccagcttatcggcgaggtcggaaagcgcgggggattgaaatctctccgtgcccttttcctcgctggtgagcgcagcgagcctggtattgttagctcatatcaagatcttcttcggaagtatgcagcggatggtgcgcttgttattgacaactggtggtcgtctgaatctggatccccgattacgggtgttgcattgaatgggagtgctgcccttgctagtctggcatccgggccagatcattctcctctcacaacccgacctggctcagcaggtttcccactgcctgggtttgacgtccgcatcgtcgatgacgagggcagtgaagtcccgcgcggtactatgggcaatatcgttatggcaccaccactcgccccgtcggcattcacgaccctcttcgaggacgaggagcggttttaccgtgggtatcttaagcgtttcaatggccgctgggtcgataccggcgatgcggggatggttgatgaggatggctacgtgcatattatgtcgcgaagtgacgatatcatcaatgttgccgcgcatcggttcagtaccggtaaggaagttgcctttctttcgctttctagattattgaaggataaacgatttgactaattcctacaggatccattgaacaagcaattctctcgcacccattgatcagcgaagcaagcgtcgtcggcatccccgacccgctaaaaggccaccttcccttcgcattcatccagcccaaagctggcccaatcactggaaaaagcaatcctcttccagcaacaccgaccccgcagttatttgccgaggttaacgcgctggtccgcgagcagattggggctattgcgtcgttgggtgggattatacagggtcgggggatgatccctaagacgcgaagtgggaagacgcttaggcgtgttcttagagagcttgttgagtatggggtgaagggggagtatgcggcggagattaatgtgccgcctaccgttgaggatgcggaagttgtttctgttgcaagagagagggttagggaatattttgaggagaaggagaaggcaaatggggtcgacaaggcgaagctttagatgagtgatagatggatgtgactatgcggcacattagagcgatctgctttgactagtacttgaatgtttcgatacatcaaggggttcataaagaagctaacagtcttcagcatcatgcttatcttgttataagttatttagttcagcgatatatgagttgaaggatcctgttcaatggattacatcctaactcgacaagaaatttgaggtgtagtaaccaagtccgatcaatcttctgtagaatacatcgtgggcagcccctataatcagctgccgtagctagcatcatacaacataccatccttcccctgagctactggtgtaacattatgcctcaattttaatgcaaactgctggtaaggtctctacgctgggctcacctcatataaaatcgaaatctccacattcctttcccgttacatcctcgctctcacagagctgaggagaaagggtttgtcatctccaggaattacacccgcagttgccgtgcactcttacactcgacaacgatatacatatctcatattcataacgaggatttgtcccaagatttatgaatacaagttgcaccggatgttggatatagtcaccttccggatgccggtagtggctagggttttggactatcgaactgcttgtgtccgccatgtttacactgctcgagcaaagacaacaataatttggtggcctatacttcagcagagggtgatatacccaggaattgaagttataccgaccgtatagactcaattttaaagctacctggccgcacaaaccgcctttatacgaaggtcctgggtaatatcaaagatattcccactacataaatttctaaaatctcccatttctaggcgttaaagcctcttgaggcaatcgaccatgtatcgttaatctcgtcgattctactgccccctaaccgtatataccactatatatccttatcgtcattgatcctcattgatcccgacgaaaaacaggatgtagggtgtgaatagcttcatgtttcaagcccttaaggcgttcttaaggatcctgatactctgcttactaggtaggagattgtcatagaaatacgctgcacaattttccgtcatgaagctattcccatcatacaaatctctgtattcccccaggtctagggtggtttgaagatgttccgatcgtacaaatttagcttcgggctttagtatttcgcatttgaaagggtcgagatcaatccgtagaggcatacattgacgtgcggtatgaatagcttaaacgccaggaactagagagagatggagctttgtacggtcagaagaagagcgtcaacgtcaaatccgagggaaatggagatttgtatagaatatcttcaatgttgtgcaagaaatgtagatttgttgaattcaagagagagagagaagagagccttccttccgctcttctctcccctttctcgtgactttgaattctcccaatttgacttctaccacatctgacatgaatatttcacgagttcccagccttctcctcctttactcccctgctaatcaagtagtaatcaaatattacactggaggcattcaggaatgaattctttccagctctcttgccctccctcctttgcatttccaactccttaagtctccactctggtcacaatggagatctcaccttttgtttacaagcttaaaatcctgaccggtattcaccttgtcaacttccccattccaaaatcccgatcaccgagtggtctgaagggcacacatatgacgaggtgagcgaagattgccccaagcatagatttctagatagacaccttccatagccgatgtactgcttcatcttacccgtaccgcccacgtgaccgcatatcccgctatcatattccttcccctgagctatcagcgtaacattacagcttaaagcacgccaaatatagaacatatttatgtaaaagtagactagatcaggtaaaactcaaagtgtttgcccttgaacctctcgagctgacaggcgagaaaggccgttcttctgcttcttgttattcttcctccactgccacctttcattccttgttatatcctatgctccccctccaagatggagccaaccaagttcccaaagagacccacgatgcgatgggacccatacaagcgacaggtactctgctgtttatatcgattctttacttgcaacaagaaacaaaccgcagaaatattttcctacatgtttcggagccatctgaaacagcgtggcattcaaggctttgttccatttgccacccttaacacccaatggatttggatgagaaacaaacgggatccagtctggctccgtgtgcatatcaacaccgcatttgagaccagtggcgagtggggggagattattacaaagatcaaatctgcagccaaaactttgcggttcgaactacatgagaagatggaggacgatactcacccatcgcgctgtggtcctttggtgcccgatgccgaacagaatattgcatccgttagtgacctcgaacacgtccaatctgcatgcaagctaacgatttattctcctagcatggacccgctgtgccaatgctttcccaatcattgtttactgcggagactctcactccaataccattgttgtccccgagccaggaccaagccttcgaaggaagatacagagcgaaccaaagcgccgatcagagcatcgaccagagcatcggtccgcagaacgaccttcacattgatatccccaatagaccccacagatctaccgagccggtggtcactagcaacggaaagttgtgcctctggtgtgagcatgaaggaactatccacgagtccgaggacatccaggaactgcaaaacgaagactacgattacgacagtgaatatgaggagcatagtgatggcaatcagcataatgaccgacaagacgatcctggtatgacagattacatccaaggatgcaaacagttcgtgagggagctacgtggtgaagaattgtttgattcagagagcgagccgtacctgttgaaaccccacaaaagcctctcaagaatgcactcattttgcgacccgcacttgcccttaccgctaaacctagaacaagggtctctggattcggaggataattcagattggtgcgctgacagaggaatccctgctaatttggctgattttgggagcctttcaatcgcaatgaaaaatcggagcggtgcccttggtaatgagcgaacttccacacaagaaagtccgcgcagtttcagtttctcccatacctgcacagatcacgatgaggcgctcggcgaccgcttaggtggtcagaacgcattgcagtatgaatggctctcgaatgatagaatgaggatggaaaccctgcgccagatgtccgtggaagctctccgtcaggttgaagaccagtcaaccactcacctatctcaggaggaaattgatgtcttgatgtatgacggcaatacctggaagcagttgtagggagagtgagatgcatatacataatggggtctagattcaagtgtctcatatttcacattatcgaactaggaattaggcccctaggccttaaacaggaaccttggtttttgttatggtctagtggtagaatgtgctgtatactttccatcagacaccaatgtatcaatccaaattttattaatttgataccaagttcaagcatgggctattatgctgtaggccgctaaaaagtaaacagcctttgcatttctctatcaatatgctaatcttgactttctcatgaaagaaggcgggctcaaaccagatctgagacgggctttttttgtcaggtatgaggaacataaaagggatcaactgaaaagctatcagaaaaacagaagagaaaaataacagtgaataattggttagctcaacctgaaagaaaagagagggaaatatccatattcaatactcatagagtaacaaacatcaatgatggctttagggttgaaatgttgtagggagaaaagggatggggatcgtgtgagggcggggataaaagagaggatttggtggttatggtaacaatgaaaactagaaattgcctagttgactatcgagaatcgtgaagattcgaaggttaaaatgaaaagagagatgtagtttgcttcatcaatatatctggaagtcaccagatgcacctaactcatgttgaaccaggtaactatgttaaatctttcagctgctcctcaaactttgcccactgacccttcaccctacatgcagaagtccagtagttccctttctcatcctttccgaggataaaaaacccgtccgcaggcttcacagggccgtgattctcctgaacatatgaaggcctgcacggcatgctgtcgtctttagggccctgacgagccggggaaaaatctaagttgaacaagccagctttcgaccaattggagaagccgacctgcgccatgccaccatctccaaatacgataataggtagaccggttccggatgtgcgaaccatggcgtaatatgcctcatgttgagcacgcgtgccctgctcgttgatagcgcaccggacctgctgtgcgagccagctgagcggcttggaagttacatcgcccgcggtaacaagtacgttggcccagccgaaagcgttgccaacgtagggatgctcggtggaagcaggcaggaggtcaccctcaaaagatctgcggagtgacatggcgattgatgtagctacctaaggagggtgtagtgtgagtagcttatttaacagggttacagtattggagtttaccgttctctcagggttcatccccatctcgccaaccacacagcgtaaaatccaggccgtcagaacatcattctcagtcaaaaagaccttcgatgggtcttcgccgttcgcagtcgcctcagtacaaagctcgtctacagccttctcccattgcggccgccaatatgtctctggaatacagaccatgcggttctccttggctcggacaagcatatcgaccccataacctaagccccaccgcagcaagcctcctagcccgaccctcctgtcagtcaacacatgttcctcggtcgtagggcgcgacccctgggcgagagagtggaatggatccgagtttataccacatgggatcaatacttcggcagtttttccccaaagcatggagctccatcctgcgacgacatactgcatgcccagcgcgtcgaaggcagcatgctgccattggagcactacgacggtcttatcggtgaaagagttgacgcgcaaccctaagacaggaaggtcggaggtgaggtagtcgtttatcccgttgggcttgtacccaggctcccacgccaggccttctaggtcatctgggtcgctaacaacacagggccgatcttgcggcttcgggattcgagaggccgtcgggtgtaaagcggcaggtatgccatgattgacatgggcgaaggatattggtggtctgccgatcgagaactgggctggaatgtgccattcgatcttacctgcggcctatttggtaacgccaaaagtgttaactagtataaacccgtgggcacttcatatgtttatgcagccctagattttctctttgcagatggcccattcttacattcttcctcagtcttcctcctaacctttgccacccctctcgtttgacgaggccctcaagggattcgcgcaatatttctgggtcgagcactgcatcaaacacgagagatacagccatgttattaccctggacaagccaactatcctcgaagaaatggagtggaaccactcgatcgcccggaattggctccatggtgggctgacgccaaaacggcattttcatggtgtgaattgctctatcacgaacagaaaccaggctgcctcaaagaaagattactgcaaaatacttctttgaacaaaagaataatcacatgcattatgcagctggaaacccctattctaagttgcaggcaaaaacatggcgcgggggccatttcgttgttctttgaaggctagatctaatgtgcactatactagtgtcgatctccactcattctacttgagaattgacaagtctcctctcatgatactttttgctagcgtgaaataagtaccatttgtggaggagatagaaaggtatatttgttataggctaaaaaaggatagtctacagcagttagctctggtcgcaggatgagctagggcaaatgagactccacttggattttacgaacctccgatattactggctacagtggtttgctacggttctggatcaactgttgacaatgttttagcccgcgtagcaagaaatttgccaacactggacggggttttatacaatagtatataggggtagaagacctatattgatatagatttaattaactccacaatcagatacaatggatctggatacgaccccaggaataccgccgccagatggccaggaatcacatttccatgaaccctataactcgttgcaaatagggactgtcatcgcctttggcatcacctatctcattgccacggttttcctcgctcttcgctatttccaggctttcaagctgaccaagaagatcgagatagacttgagtaagagaccaacttcttcaacactctgctagacacttattctactcgatagtcactatcacgatttcttatggtgttgcactggtatattttgtgactgtggttaactgcaagtctcccgtgactatctttcgggttaaggtataatctgactcaaatagtaatgaactatggctggggaaagcacatgtggaatgttaacttggaagatctcatggagtttaataaagtaaagacattatttgcataccctagcacattggctaacaagatgcagggtctactcatcaacaccttgacttatttgatatgtccatgcatcaccaagatggccattctatctgtcttatttcaaatcaatcctgcgaagatatatcgttgcctcgtcgtggctgtcgcactggcgatctttgcgtacactctgaccttatgcatcatcaccggaggaccatgtaaccctctccatgcaggaaccacagcctgtctagaaaatgtcgccttatcccaggcagttctgaacattgcctctgatttggcagtgattgccatcccgatcccaacgatacaccgtctccatttttcagagaaacaaaaggtcacggtcggctgtctgctgactttgggatctaggtgcgctttccctcattcttgaattgttctgatgccatgattgccgctaatccccaccccagtgtcgtcatttgctccatagcacgcctaccatacgtcttactcctcggcaaaaccgctgacacaacttataccgaagccatcctaggagtgtggtcccttgtcgaggtcaacctcggtatcatatgcgcctgtgcaatgcggttcaagcgcctaatatcgatatatctaccgcggctttcgctatccccatcgcacacgccccgtactgcgaaactcacagaggacacacctatgaataggttccagcccaaaaatactggagggcaacactcataccggctacacagcatccatgatggaaatcccaatccgttagctggcacgaaagatatctccgtccaccgatcgtttaaggtggatgaagaacgtacatatttgtaccgcagagacaatgatagcactgacaaaattttagcttgagtcacatatatgtcaataacttgtgtatatttatatattttgcttttacatcagtctcatcacctattggtatgcacgatgtagaattctaccgaaatacccgtggttaaaagatctccacgctcatggcttgctgctcttattgggaatgaccatagaaggtcagttcacgtaaatccaagagctgacggcaacctactaaatggacacaacctaacgcagggtgatgactacgacttaatctgcaagatattcgacattccattctcgtcactgtataagtgaaatccaagcatcggtccgttcatgcaacccaaactatatggtctgctctgctaacatcctcctaggctcggattgcactaatctctggatgaacactcctgtgggttaacatatcatgaccatcgaatgattatctttatactccgatggcaatacatcaaaacaagtacaagtagaatatcggggtccagtgcaagtaaaataagtagaaagtaagagatcattcttgatcgaagttaaatttgtgaatataataaaacgcgctatgtccaggagaataatgcgcaaaaaaacaagaaaagataagctccacaagaaaggcagacatgaaaagttaacccaagagggctcattatgtattatctaagacgtagacaagacatatacaccagaagaacccacagccgtaaaaacccgacagcatcgtgtggttttcatcaaagcgataacaccagtcacaatgctatctcttcatgatgccattgacaatcaactgctttacagcaggagagcaacggcaccaaggatggcagccaaaccggcaccagcaccggtagcggcgttcatggcaccggtgttgaaggcgggctgggagggggtaacagcgctggaggggctggagggagcactggaggggctggagggaacgctgggcacgccagtggagccggcggtggggaccagaggggtggaggtgacgacgctggggacgacggggatgaggggagtgctgctgctggccacggggctggaggccaagggagtagagaccacgggagcagagggcgcgggagcagatgccacaggagcagaggccacgggagtagagaccacggcggtggaagagctaagtaatgtgttagattaaattaattggtcacgttggatatagagaaatccttaccaggagttgcactcagtcacggtggaggtcgagatgggacgggtgacagtgtagggaccgtggctcatggtgatgtagccgggctggaatgctgttagtatgcggcgaagacttgttgctcaggaaaacatacggtggaaatgctgtaggtgtggcttccgtgtacaatagaggtagcctcagggcagtaggtggtgtactcggtgagggtctcggtgacaacaccggccatggcaccagtagcaccgagagcgagagcggcaatagagaaacgcattgtgatatagttgatagagttggaatggttccgaaaatgttccaagatgaggtatgtaaaagaatgacagggattcaaaagaatgtaatcggttgaaaaccggggatttagagaatgcagtggaagaaagagagaggaaagaaggggggggagaagagtttataaccaatcctgtagattaatttaaatgagattcaggtacccgctgccactcacacactgaggaaaaggggcagatagagtggcaataagagagtagcgaaaaataaacaacgaaagtggattggagccacatgggaggtacttaattgtacagccaaattaatacgacggctaaagtcacttcctccctagcgttcctcctcaccttaagcgcacgctccagggaccaggccgtcccttcccatttaggcactgatgggctagcactggcgattgtaatttaatgatccagggtcggagtaacttgaacgtacggagtatatatctatattgtaaatgacttcttattctgtggttatgccaagacctcaaaatagatctccaaaataggcatttggtgtcttgtacggagtctccgtatcctattttgtatgttgtagatatcttttgagtgaccagtcttcaatctccagtagattacgtctaactaattcaatatgtacatagttatctaagtacttccttaaattctaagatcgtacttacatacatcgaagccctaattaactacctaactaggtagaacatacatgagcatcaacacctccccttgctggacagtatagttgttctagccaattgtctattgtgagggtggagtgcaagaggggaatgcgagtcagggtcgtggaaggggctagttaaatcgtgttaagaatagtagcgactatatactgttaaactaattatactcgagagtcactcggagcatacggatcgtacgtcctcgttgtactagagtgtcgacaatgagacagcaaaaaaacattgtcgcgaaggggttcagagatgtggatttagcacagtagatcaatcctgaccttgccttggaggtgaaccaacacaacaattccaatccgataagtactggcccctcaaaggatggttaagaggcgtgggacctttcagcagcgcccgtccagcgccagctagaccgaagtccagccgtcaccgacgagtgctgacacagattaaaacgccgtttcttcatcttggatttagttgtgtgaagaaggaaaggagggaaaagttttgccgggcgaagataaaccaacagccgacgcacggaccaggcggagagctcgaatgggaatagcgcattttcccgctttccgcgggcaacggaaaggtgccagtgctcgtccgacaagcatcagtcgtttaaaagccgtggctttcctatcggctaagtacataataccctgcttgagaattgaccttcttcagcttcatcatgtatttgtctcgctgtggtagatccgctgctcgcttgcttccccttgggagctcccgggcagccgttgtctccgctcgcgcctcgatcgtgcccagattagctcctcaatcgcggggagtagcgtcgtccactcgcgattcgcagcacaaggttggcggccagaatcgattcaatggcaagcggaacatgtagactgactatttgatagctgctcgcggcatccctagaggagtccgaccccaccgtttataacatcctacagcaggtgcgtcatcgttggatatagagctcaccaatcgaacgaccaggtgctaaaactatcacaggagaaaaaccgtcaaaagcacttcattaacctgatcccctcggagaatttcacatcgcaagctgttctcgatgcccttggcagtattatgcaaagtacgtactccgggtggccgcctctgcttgctcgacagactatcctaaccgcaatttagacaaatattccgagggataccccggtgcccgatactatggaggaaacgaatttattgatgcctccgagcggttatgccagcagcgtgccctcgaaaccttccgtctgaacccggaggaatggggagtgaacgttcaacgtatgaaccagttgacgtgatataattaaatatgcgaagactaactcattccagctttgtccggctcacccgctaatctcatggcctactccgccctactcaacacccacgaccgtctcatgggcttagaccttccccacggtggccacctgtcccacggctatcagactcctaccaagaagatctctgctatctccaaatacttcgagaccttcccctaccgcctcgatgagtcgactggcctgatcgactacgatgcattggagaaatcggccaccctataccggcccaagctgattattgcgggtacttcagcctacagccgtttgattgactactcacgcatgcgcgcgatcgccgactccgtgggcgcctacttgctatccgatatggcccatatctcgggtctcgtggctgctgacgtgctcccatctcccttcccctactcagatgtcgtgacgactactacccacaagtctctgcgtggcccgcgtggcgccatgatattctaccgcaaaggcgtgcgcagcaccgacaagaagggcaaccccatcatgtacgatctcgagaaccccatcaacgcatccgtcttcccgggccaccagggtggccctcacaatcacacgatcaccgcgttggccgtggctctcaagcaggctcagacgcccgacttcaaggcctaccagcagacagtgcttcttaatgcctctgctctagccgatcgcctaggtgattctaccagcaacggtggactcggctacaacattgtgtccggtggcaccgataaccacttggtgctgctggacctgaagaaccgcggtgtggacggtgctcgcgtcgagcgcgttctcgagttgtgcggtgtcgccagtaataagaacacagtgcccggtgacaagtccgccctcaagcccggcggtctgcgtctgggaaccccagccatgacctcccgtggcttccaacccgaggacttcacccgcgtcgccgatatcgtcgatcgcgcggtaaccatcacccagaagttggacaaggctgcccgtgagtcagctcagtcccgcggtgtcaagaaccctaataccgttaaggccttcttggagtacgtgggtgggggtgaggagatctcggagattgttgttcttcgtcaagaggtcgaggactgggttggtacctttagcttgccgtgggctgatgaccagtagacgttttcttttttttgattccctctgtatatctccttgcatgatttcgaaacgaatatgattgaagactttttatttcatttaagactagaaatgaacaagtgtaagaatcaagtttcctggtggaatatatatagtgtggactttactccgcaaagtctaattcgagacggaaaccggggaacggtgtcatcattttattttctgctgcatcggggtacgatatactgctctttatttcttcatctacagcaagacttcccacctacaatcatgaaagtcagccaggtaagaacacggaattacgttgaagacggaaatcaaaatactaacccattgtcagctctatgtctaccctattaaatccctccgaccaacaacaatcacagagggattgttcacggcacgcggctttcaatatgaccgccacttcatgctcctcaaagtcatcccaaccgaggatggctccggcaccacagccttgaaaaacatgcatatcccgcacttcccagagatggccctcttccacaccgatatcgagtatccgcagacagaaaaggacagcgggaaactaattataacataccaccctcctctgtcggactcagctcccaaaccccgcgaaatcacccgactagaaatcccactccagcccaatccgaaaaggctcagccctgtcaaggtcgtaatgcaccagagcccaacaacaggatacaacatgggcgcagactataacgactggtttagcgcctgcttcgggtaccccgtagttttagcctacattggatcgcattcgagagaggtgcttggcacactcgcgccagcacagcaagacaaaaagacggcgctgggcacaatacgcaaaagcctaaccagacccgacaggaaatgggaacggtttctcccgattttcattgtagcatccgcgatcaacatccttcttcagagcggtactctcgttcgcgacgggacaactccccaagcagctcgcagtctgacgcccacgctccttttcactgctagtgtggtggtgctagtgctacatcacttctgcactctgcatgcgcagcacgagaaccgcattaccttcgccgactgcgccccttatctggtcatttccgagacatccgtggataatgtctcagcgcggctgccggacggggaaattatggaccgcacgaagttccggcctaatatcgttgtttcgggggctgcggaggctttcgaagaggacttttggcgtgcgctgaccgtgggcgctggatcagggcgtggggcgactaggctgttgctaacggggaattgtgtacgctgtcaaagccttaatgttgattacgagactgggaagatggggactggtgagtctggtgctgtgcttaagaagttgatgaaggatcgcagggtagattctggggcgaagtttagtcccgtctttggtaggtatgctttcttggagccaaagggcaaggggattattctgagggttggggatgaggttacggttgccgagaagggaactaggaggtctattactggtgagtgtttctgcttttttccaagcaaattatgagagtgaacgctgatttactgggttctgtagattggcctggcctgacaaattgaaaatagatacatttctctttcggttgtacatcgacacggacatctcggtattgtgtagatagatatccggggaattgacgtcatggtggaggttggaattgcactatgtatacagatttcgggcctttctttatcctctgacttgtccaagtcttgatgatgaaacaatacagactctttttatattcttatgcatcaaactacatcgtaggtgagtcccgagtgagaagcataagaaatcaatttaattgggggataaacacacagccacaattacatcatacccgggcaccgccaccagttgccccaattagtcacctgactgtcttggtccatggaaaggcaactaaatgtggacttggattcggtttctaagaataacttgcaataactttgaacccccgtttcttcttcgtttgccgattctattcagtgacttgtgcgactcatcttatacattgcgttgtggtcaagctagtccagccttaccgaactattcagggactgtggctcaagcccctccaatcatcacgcatacgccgctgcctatttggagtccactttaaattgcgactctcacattgacctgtcacgcacccaaccagagctgcattcgacttgtgtgtttcacctgcgtgacgcttctaccccgcgcttctacctcacgcttctacctctttccaaaacgccaattatcccgcgatccggtgcatagttgaggaaggtatcgctgagccccgccgcgggtaagctggcgcagcagaaaaaaaaagcgatcgcaatcgttccaaaacataattgttataatccccatggatccagccaatctgcgccgcaaggacaccaccaagggtcctccgctgcggattctgtcgctaggttagtattatctctcttcccggcgtacatcagactcagctgacctgaacagatggcggtggtgttcgtggctactccatgcttattctccttcaggaactcatgtaccgcacttatgttgaatgcgaaggcaagcctccgcgtcgcgaccagattcccaaaccttgtgatcacttcgacttgattgcaggtaccggcactggcggcttgattgcgctgatgctcggtcgcctccgcctggatctcgagacttgcaaggaggtatatgtgcgtatgacccgcaaagtatttgagaccgacaaaaccatcgctggtattccctatcgctcgactttgttcaaggcctcgaagctcgaggaggcgatccgcgaatgtgtgcgggaacataccgtgttcgaggcggagggaaacgacacggggaatgggccgaatcatgattctatggcttctatggcaagcttaccatacagcccagcctctattccgcaacgctctatcagtcgggccagtttcagcaccgctgctgcttcgcatccaatgtccccgacaagccaaagaggctccgtttttcttaatgggttgcgttggggtaatccagacgcactgctctatgataatcgagaaaatcggacaaaaacgtgagttctacaatgcgaagacatgtgtcgctggtactaatatgaaatatagcgcggtcactgctatgtacaagggcaccccgcgcaagggatcggctgtccttctccgatcatacgactcccgcagagaacctccgcctgaatttgactgcactatctggcaagcgggacgcgcgacatccgcgacagggcttgctttcaaacctatccagattggtcaaaatcattttattgacgagggtcatggcacattcaaccccgcaccgcaggtacttgatgaagctgtcatgaatgagtggccaggtcgggaagttggggtctttatcagcgtggggactggaaagcgcccacctggtaccaataaccgacaacatgaatggtgggaggatttcttcggcgactcgttgggcacatttgctgaagcgcggcgtcgactaatgacgaagattgagggctgcgagggaatccacaatgatatgattcgagaccgtctcgccaaacgcaatgtcagcaaagacaattatttccgcctcaacgtcgaggttggcgttggcgaatttggtatgaacgaatggaaccggctagccgatatcagcaccaatacacgacagtatctggccaggcccgaagtcaagaagatgattttagatgcaggtgtgagatttgctaagatcgatcggatgaaccgccgtctggcaagccatgccgcagctggcggggatcgcgacgacttatcttttgatcttgagactgaagagctttctttttctcctcccattcaatcacatgttccgccccctgcgcacttcgctgtcgaactacctgcggagctacctgcggagtttcttaaccgcgcacatcaccctacaccttcacaagcgccgccacccatcccaaccgtagtgactacatcaccaacggatagcacgctcccggctcacccaacacctcaggataatatatctatttcctcgcctcggcaatctggcagtgattatcgtcgaagccacgagctttcaagccgaccaagctcgcaacaacagagcttgccctcccacagtgatgattattctacaaccttcaatggcatggcaccaccggtgccgccgaagacgcctatcccatacccagctcaagaagatggcggcggcgtgtctatgcccgcgccgctattctcccaagcacctttctctacctctacctcgaatatcaaagtccgacctccctacccagttgatgagccaccaccaacggtgaaccggcaacgcaagcccagctaccacgtacggtgatcccttctcacctgctttcatctcgataccttttttttcaattctttacatgtgcattacgttgtttttgtgtctttcctgctgaatacccctctgttgagacggttgattaaggctgagagggcgtctgggggcatgtaattctatttatggggtttttattttagttgacccactgcgaaagatggccagtgctggcctcgctcgggcataatgaatgatgacatttatgaagattcaaatgtgggaattgatagtctgtatacatacctgtgaggggaaaaagaaccagcatggcactctcatctacatagacatccactacgatataggtacttgattctccgtaaagacaggtgacttgtcccttaataatgtatatgctagcgtatattgttcagaggactccataaactactgcaagcaatataagccgacgtccaaaggtaccggtacctgccgatcgcagcacaagcctcgtcgctagaagtaccggtacctcctttccccacacagccccccagccatctcgatccctttccctctcctcttccccttccccttttctttattattttctttaatgtaatttttttctccattcttctctgattctctgattctttgtctgaaatagattccactttcttgataccctcaaaatccgaactttgtcaagtgctagagtcatagcgccaacggctgaaattcccccttgcggaatcccacctttttccttccctcgtggacattttccagaagcattcccagatcgccgttctaaatcgcagttattcccctattacaaaggtcgttgcgatcccgcgactcggaatcgttgttgacgtccctcgttgatagtcgccccggcgatacgcccagtctttatcgatatcgcggcagcaccactaagtgtttcaaatagtcgctgggtctcgtcttcggacgactctctgtccccgtctcttcccactgctggtcagtgtggttttaatctccagtctccacaatcatggatcccaattccgccttgtcacatgcaaacaacctgctcgcgcgcgcagaatcttcaggccgcccaccagtgtacaaggccgtcggtgtatcgctagctgtcgcatcgggcgtcttcatcggtatctcgttcgtggtaaagaaaatcgggctgttgaaggcgaacgtgaagtacaatgaggaggccggcgagggatatggatatctgaagaacttctggtggtggactggcatgacgctgatgattgttggagagatctgcaattttgtggcgtatgcgttcgtcgatgcgattttggttacgccgcttggtgcgctctcggttgtgattacgacgattctgtcggcgattttcctcaaggaacggcttagtttcgtggggaaggttggctgtttctgttgcatcattggatccgtgacgattgctatgaatgcgcctgagcagtcctccgtcaaggatattcagggcatgcagcattttgttattcagcctgggtttctggtctatgctggcttgataattattggggctgcttttacggctctttgggttggtccacgctatggaaagtcgagcatgtttgtttatatcggtatttgcagcatggttggtgggttgagtgttgtggctacccagggcttggggtctgctattcttgctcagattaatggcgaggagcagttcaagcattggttcctctatgtcttatttgtgtttgttattgggacactgctgactgagattatttatctcaatgtacgtcttcactcttctcgtgtctcatggctatgtactaacccagctatacagaaagcgctgaatcttttcaatgccgctctggtcactccgacttactatgtgctattcactagcgctaccattattacttccgccattttgttccagggtttcaagggcacgggaatccagattgcaactgtgatcattgggttcttacaaatttgtgccggtgtggtattgctgcagctatccaagtccgctaaggacgttcctgatgctgctattttcaagggcgatctagatcagattcgggaggttgccgaggtagaagagcccgagtttgagcccaaagcggactccattcgcggtgcggcctctatcattcgtcgcatttcaactgctcgccgcactatggaatcggatgaagcccgccgtttctttcatgataagcatgaagataccctgacagtgccaggcgagaatgagataattgaatgggatggcctacgccggcgcaagactgttattggcgagggaccgactatgtcacgaccaatcactccgcgaacaccctcggtcaaacaacaacatcctccgtggggcatgtcccgattgcccgctgcggagcatgaggacgaccaccgacctaacaccaagcaaagcggtcattcttttatggataacattcgatctcgggcaactagcgtgcttcatcattcccaatggaagcctgtaaatacagaagacgagaaaggttctaacgccaacacccaatcgatgggaatgacagacatggcacaccaaagtggcaatgttgacaccgaataccatggtgccggtatggctggaggtgtggaggctgtgttcaacgcaaaccgtccacgtagcgatacgccgcggtctatatcatgggcagacgaaaagcccgaatcactagcaccggaacctcttgccaccactacccgccgccaattttctttcaacaacatgatgggccgtatgaagaccgacagcgaatcttccgtcaaacccacaccaggttcgcccccccgtggcatcctacgccgaacgcacctggcacccgatctgcgcaaggacgcaactgaggaagaatcactcggcctcgtccacggcgactcacgccgttctcaaccagaggaagagcccctgaacgaaaagctagaccgttggtcgagcgccgagtcagaacttgacgaaccccagcccatattcacaggtcggtcacacggcaactccgtgtctagcaacatgtccaccgccgcattccccgcctatgaggataaccaccaccactactccgagtccaacaacccctactatctcccgcacaaccgacaaactacctcatccccagaacccctctcccatgaagaagagggatggaaacaccattcatcgagggggagcagcagtaggactcgcacacggacaacctcttctgttcatgtgcattctcacgccccaccccccgcccaatcctccttctctacccaccgccatccaaaccccttgccgccactccctgatatcacacccaccaccaccctcgatctcaggcccatcgcaactaattcgtcggcattgagatcagtctcttcggaatcagatatggtaacaaccctctctagcgaaacgggagacctcaacgatcacccccttggctacctcgcgcgccaacagagcggctggcgtcggcatatgtctgaaaacagcagccatgatggcgagacgtatgccacgcgcggaggtagaggaagttcgttcaggtgaatgagaaacttgcaatctttctggcttatatagccatcctggattccagtttatggcgcacatatcctgttttctttccctatagtattttgcatggctatggcgtttattgagagattttgttgatatgtcttttcttttctgttttttaactgatttttgtcctgtggtcgaacctggttttgtcaaaccagtctgtacatgtacggtgattgtgattgtgatcttgtatataatggatgttatgataatggtgcatgatattaatgaaatgagaacctcaagtgtcaagccgagagtagagtactgcataagtcgtatcagcaacggtggcacattagtcaattgaacgagagaaatttcaaagcagacgtttcatattcatgacgatcagatcagattcgatgtgatcatagatcattgggtatcctaagtgcacgtggttggaatgctcataatcccaagccggaaaattgacggaaaatcatggctctatccaaaacgccatatgctatgcaaaaaagaagaaagtcgctaaatgccaaccataaccatgtaaaagaagatcacttcttcggctcctgcgcaccaaacatcccagcaacactccgctgccccttggcggcaacatgcatactagggaaccgggactcggcaagacgacgcccagctttgatactctcgagagccctagtgataaaaggttcaacatcagaaagggtcacttgccggtcttcaacagcatcaggatagtacataccagtccacactgacaaccttcacgcctttccaccccccacgggcaatttcctgctggagcttgcccgccgcaaggcctccccctgcaccagatacatccattccactcccagccccagtattgggctgtccgacaagaacatgcgtcaccgtcttccgggccatgtaaatagaagtcttagccccgttcgacgctagtaaatgtttgagtttgtactccgaaattcgaggaagtgtggagccattgatgaataccgtaacaccagcgaagatacgcgaagtcgactttaaatcaagactggcgctagagtgggactcgggttgggggttgccatctatttgagattctctctttttcatttcccttgcatctcgagctggagtcaacccccggttccctccaacagtcctaagtctcttcgtctccacatcggtatgctgctcgggctcatccacaaccttcctcttgctaacacccataaacgaccggatgtcccgaacaccgagttcgttccgctttgccacatccccagctaccatagcccactcaccggaagcagggactttgggcggcgagtgcggcgcgcattgcccatcgaacaccccgggtacaagcgttgactctcgtgtttctgtattccgaaggcccgatcccgatccccttccccgtcctggaagacaatccccactattatactgcctggtcaatttcgccgaacgcgcatctcgccatgatgttgaaccgaggaaaccgccgccgtcggctgcatgctggtgacccgttgaggctgactgccaggagtcgaaatagaggtggttttggggtcctgggggttgtggttttgcggctcgttctgatcggtcgctggtcatagttggatcttgcaattttgcgggtttgtggcgagggtctctattcgaattttgagggtgacgttggccgggatgaggtgttctgggatgtcgttatgcttgagttgaaatttggcgagaagtcgccgtggcgtcaaacggaaagaaccatggttcgcatgttttgattttgctgttttgggatagatagggtagatttagtcacgtggtgtgaggtatgcgagtacaatgagccatatacaatttatagactctatttgacggtttccttggagatacacactggcactaagctgaagcttgagaacaagtctcaaggatgaagtaagataaccgaagctgccatgaagaaagcctaagtatctaatagctatgaatgcccccgatgatctatagcgtcaagtcgtaacggtcaagttcaatagctcaataagcgaagcaaggcccagcagactacaatttacaattacatctacaagctgtaaggcgagagaagtcggaaaaaacaatccatttagaccggacaaaaccaacgttgtatgtcgctaaaggcatgcagacccagagttcataaccgttcattaccatgataatcatctctctagtagagtggcagtggcagaagcagaagcaacagcagcgcagagagtagagaggggagtaaaaccaatgccaatgccatgccacaaagaatacccttttcaaaccccagaacacgcatcaatgataaaaagaaaagaaaacaagagaaaaacaactcgttaatgaagatggctcgtcgtggtcaagtcatcacacaaagaaaattcgttcataagagattcgtcacatcgtagtcatcgaggtttgcgatcactatccaagtcttcaacaagtggcaagtcttttaaccacggaagtatcaagaaatgcgtcgctaatgttgtaccgtgaacagatcttgcgcctaattcttcccctctcccccacacaagttagatattctcaaaaaaaagccaaggtttcttcaacctaaaacataacgcaaagagacaaatgagcttcgtttcgtttcgacaccgccgggtctaccgatatccacgtattcgtagtgagacacagacaagaccgcggcgcgccatgcgggttgtgcatgcgtagtctatcgtgaaaaacaaactccgaccgagaaattaaccatcagtaaaaaaaaaaaaaaagaataatccagcaagagccaaacaaaacccgaagagaaccggaacaaaaaaccacaagctcgaagctagctagaagctacaattgaattgcacgccctcagcggtgacgagccatgaccccactaggcttcatgggctgaagaataggcgggccaccgaccggacctccgagggtagaatcggtgatggtcttgcggcgctttgaggtctcatactcggcagtactctcggggcggatatcgtcgtcctcgcgcatgcgcttgctgcccgcactcagcgaaccattgccagatgcgtagaccggagccgtggtcgaggccatggagtaggggtccgacgcaccggtggctggggtaccgcgagtatcgctgacagcgttgtacagggtagtggcggcgggacgaggaggggtgttgtagcccgaagcccagtgaggaggggggccggctcccgtgcgcggagtcatgcggccggagccgttctgctggctcggggagctggtcatctccggggtgagctgggagtgctcaccggtcagggagctgacggaggggtttgtggtgtaggtgtaggagctgcggttggagttgtagccggcgttgggatcttgcatgtactcctggtcatgctcggcgacagtctcaccgggtccattgctctggctgtagcggtttgtgtcgcgctcagaggtttcgggctctgaggcgccgggccgtgggtttggtggcgccatctcgcttttcatgtacccgccgggcaggggttggccgtagttggacatccctgattgagtcaatggggtgtgcggcgcgtattgggcatgagtttgtggtgccgcggagtagtagggcttggagctgtcgtagccttggctttggtaagctggcaagccttgcatgttgttgcccggtggggtggttgcgggggtggttggcattgagcgctggttgctcagcgcggtgtcgatggacaggggttgtgtatgtggcacttgtccgccccattcgtatgaaccttgatggctgacgcccatcagactggatgcgctagctggcggtgtggggaatgtgttggcacgttcgagatttggtctggagccgggctggccgtttattggaccttgggacatatgagaagacatgggggtctgcagggaggggtggtgatggtgaatcggggtttgctgagatccagatggcgtacgctggggacccggaggtggaccttccagacgtcgctgctgggactcttgcactaccatatttgtccgagtctggttagccgggtggtatagaagaccaccaatattatgcacgaagagtgggtataggagatcagtgatcttctccttgttggcaaattctagagcacgctcaaatgggatcctgaagaataaaagtcagccgatgttgcgcatgctctccggggtcaaaatacataccagacacctttcaaatgcatcggtccgattttcacaacatgacggagcttctcgcttttgaggattccatcacgtcgaccacgggtcatgccagctacatttagcagctttgtgccattgaccatgtggttatctgcgggagaaacgttagcaaacatatcctcggttgaccttccagcagaatcaacttaccctcgcgtcgagccacgcacactccctttgcttcgacctggtagcagaggcttccctcatcttcccataatgttgctgtcactcgcggcttcgctcccggaggagcaacttgcccagtaccatcaaagacaaacccttgtagcggagcaccagtagtgtttgcatagccactcggaggtgccacggggtgattgctcacttggtaacgatcagaataatcatccatcccactctggctttggagcttaccaggtaagggcagcaactggctctgcatctggccacccatcgaggttggcgggtgtcccgcgggtgaagaaacgcccggggcgtacccatattgggggtaagcagccggggcgtaagaagacgcgggctgcatcaccgggggttgcccgtggtactgatagtgggacatagcccctgcggttgcgccttgaggagcgtaggactgagcagaggacatgtgcgagtggacatccatgtacggctgggtctggttcatgctgccgagggaagttgggctgggatagtacccttcgttgaccgaatgtgggagactgtattcggttgcggatgaatctaatgaaagccggccctggttcccagacaggtccgcagaggacgggctcctgggttcgttggtaggcacagaggcaccagacagactcgtgcgagcgctagaggtggtggaattggtcgcggacgaatcgtgataggcggtccgagagaggccctgggtggctgttggcaggctgagagcggggagtttgtcgccgggcaataacggtcgttccgccgcgtggtggttgtaccaggggatgtcagcaggaccgcgggtatggacctgcgagatcgatggcagctccagcttttcggttgcacggataaacggtttagaaaaatggagggatgaagcgagcagcggacgtcgtaaatgtcgtccggcgtgctatcaatataggccgcagaatcgttggaagaccacagagcttgcgaacgtcgcacgaaggggaaaataaaaatagtaaataataaagagaaagagttgcaaacgcaatattcaacgggctttcaggatcaaacgtcccaaaaatagagaatttttatagcaagtgatgcaagatgcaggcaatgcacgtccaatattcgtagtgaagcttcgtagtaagtcgtaaaccttttgtcaagactcgggaagcctagacagaagcgcaataaggactttttcttgaaaagcagaattcagcgagaagcacaatggtcatcagaatcattaacaatcatcaatcgaacacatcaaagttgggaagcttcagtggaactagacagaaaggcgtaagtttggaggtcgtttcaaggtcatgcagggaatcatgtcatagaagaagaaactctcaaattggagcgcattggatgataaaataaggccaaagccggataaaggtagggggagggagagttcaaagtcttagacagtcgagggatgggggggttgagaagagaagaagtgcgttcgacgtacagaaaggtggaggctggggtggtgcagcaaacgcatccctatgcaggctggatagatggcgtttgaggaaaaagaaaaaaaagtaaaaacaaaacaggccaaacagatatatagcaagtaaaaatagaaatcaagggcaaaagggcgggcaatgggggaaaatgcaagcaggaaatcgtacagtgaaacttagcccagcggttaagagaggggaaaagaggtgaagcaaaatgacgctgagccgcagcgggaaagtcgatcagtggaggataagaagaagctgactaaggcaggcccaagagaagaaagagaagaatgttgtctgcagaaatcccggcttgccccgtcttttgagggagagacgaagaagagaaaaacggaaagcgaggagagagagaggccatcgaatcaatcacagtggacccggtagagagagagagagagaggactaccagaaccgtgcgtttagatcatcctctagactcgatatctgctgtttttctttttcttttctttcttttctttcttttcgcttttctctttttctctttttttcgtgattatccgattttcctttttggaattattccattattttcgacgccaccaagtaaggaccgtgatcagcaagcgttaagcggcgaggtcaatcattcccattctgaacggaccagtattaacgagcatttcccgattcggaccagacctagactgcagggacaagtccaagagaaatcctcccagaggatcctggtctgtgtgacaggcagataaatcaacacgatcggccgggataggcccgctggatctgggagttgattcccttagtggagtcaccgatcagattcaattaatttattgcttttcttgagagggttactcgagactctactattgctggggcggactgcaggatagaacaatagacggacgagctaaccatcccctctacacaccacccaaaaagccctcaaacggttcctatcatccaataaataacacctcagaaataccacctgagacggttcgtctccacgcgcgcgggtcccacccagtgaaccatgggcggtcgaccggggagtaggaacggggggaatacatcccacggtttaggctgaggttaatggctgaaaccacggttgagataccaccgtccacttcatcctacgacatctggtagtcgcacatcggtactatatcgtgcataccgatgatccaaattgaaatctcgtcccgactgctctttcatcgtgcaagacatctgtcagccgctgcggagaggggaaagtaaaaaaaaagaaagaaagacccggtaatgcgcggcggctgcaccgtcgattgcggattgcactctcccgcttctggagccagcgcttgcaccatttcccctctatttggggtacagatgatacaggctaatacctgcaaggtccatcttaaagaaacggttaaattccgtcccacaaaacccttcaccggacatcgcccgggcctcccctctcggatatgtcactgttagaggtggtcgtcgatcgccccgggtcaagtccggtcaaaggccatgtgtggttgtagccgatttggcccactacaatcctattgcaatccctaagccaagcacaatataataccaaggccttggttgtgttcttctttttatggttcgggacgatctaggcgttaagacgggccgtgagtaacagtggagagacaaagaggaaagaagcacgtcacaccccccgggatgcagaggggagaatcagtggctcagaaggaaccacgaaacacgggtggcttgaagtcaatcaagggtctgttctctcttcccaatccctgccaagtaccacgaagaccagtcagaggctaggcgtttaccgaaactgcaggcgatccccggccggttgaagagaaatgggaaatgggaaattagaaatagaggtcaaaggcaaatagaaaatagaaaatagataatagataatagaacaaaaaagaatcggattgagtccagaatctgtccaaccacccaatttcagcccgaattgaaataggcccttcacacgtagcatcacaatgtcaactgagagacctcgtgatgatgtatccgactctttcttttcgcctccaaggttatcgggggatcgtattgaggctggaatgattcatcagcctatctatgtacacatgaatgattatgttcctgatagtatagccggataatagttctaggcaaaataatagcaaataacatatttgttttgatcgaatttatttttccttacatttttcccccaacaaaaaccgaaaagcctagagccagatcccagtaaggggggaagatcagagagacgctgaacatcaagccaactcgaccccagttcaccgctaatttcgtccagagaggccaaagtccccttgcgttttggcctttttattttcatttattacttggatggtacttattctccactaataggaactaatagactaaactattcacggacttgatttctaacctgatagtctcggctctgggttgacagatgtcaattcccacgctttcccaaaaaaaaaaaataagaaaaaaataaataaaaaaatgacagctagggattcgcccggttgctattttctcagtcctaccctaatatgcattgaccactgtacatggacctagattcaatggttaatttctgagatttcggggagatcatgatcggaatatgatttccaaatatcaaattattttgtactttgcattctctagcgggttctgcaggtggcgccgatgacattgtcccgccacacagacccttgagaggtcggtgaacatggggccgggaaaatacgggcctaactctagaccaggttacggagtagatatacttgcttggatatatttcaaggccaactagtctcatgctagaacttccaaacgggtaggaataccgattttcttgcagacgttatgacatacacggaagcaggtactacccaccctcgcacactaggcccagagagctccgggaaatttacagaaagagaaagtgagaggggccagtactgacagatccctgcactgcagctcgctatcgacggcccgatacccgctgcacatacagcatacagtagtttaggggggcagcatgggggagggatccgcctgaatcgacacatatctttactggaaaaggaaatagccttccgtgccggaggatttgggggctgaatgctcaatggtattgaaaggaggctagagtggaccactgattcatgactttgcttctttgcttagcccttgtgttattattctgtcagtctctccccgacaggaatggaaaaaatggagagccgaattaatcaaaatcagctcaaatgagatccactatacggagtatacggagtacccacagccattggaacggcaactccgcaattcggctgtgatgcatcgtatgggaccgttgagccgaaaatgtaaggagatgatcagttcttatgataggtacacttagtagtatttgagatataatgtcaatcctttacggagtaccctagagagtagacagcaaatactcgactatcaaatatattccatgtgtccattcttttccactgatcgtccctccggggttttccgactatcaacactggtggatctctagggttagaggtcacatacggagactagagaatccttccaacattattagcatttatccataaactctcccatagctagatcctccacttcactgtttacgccgtcaatctcgcgtcgatcgacgggttcgtccgtaccttgcagcgagttaccctgcagactcttgtccgtgcagatttcaggcttttttcgtgaaaacggaccacagacttcgaatttaaatattcttttttttctacaatgtgcactattatcatgtttatatacggggctttttggttcctcttctgcccttccggtctataatatttcaggggctgccatgttttcccatgctatactccgtacctcacacatcaaaagaggcagaatatgcccgaagccgtctgggcagacgttcatgcccgataaggccatcagactgatgatcgcggacacacacaatgggtacaaggcctttgagaggcatgtgtggtacagcataattacggagtacgattgtatagcgggagactcggacacgaggaagatttgaccgagagccgatgacttacagggatgttccctgcagactattgatgtgttgtacaggacggggcaaatgaaaaggcgaatcgaccgagatagcctccgtatactccgtagccccgtagccccgtctgctataggtccacggtaaccagaggtacttgcccaagtaggtataggcgtggacatgatagtgaggtacatgtaccctgaaacaatatttgaattgtgactctgcttttcatgtgactggagtaatttcctggagccagaacgccacccacttccctcgcgcgaataacaatgcaccacgaagccaggatctggcgtgatggaactaggctggggccgtgcaaccttggatttaacctcgcattgcattgtcccgtggagccaagagatcgactgcacgttcatcttgcctttgcactctagcgcttcttgtgtcgcaagagaggggggaaggaggagagataggtctaacaagaatcgactagaaaaccgccgtggattagggattttgtacgtcggaccatttagtgatcataaccccctgagtggaatcgtccaatccagaagaaaatccaaaggtcttgaataattcaaccgccgtaaccgttgacaagcgccggtattttcgagtcatttattcgcttttttttttctcccgtgaccatagtggtagtccagaacaatatcacctggaatccctcatatctccgaaatagccaggatggctcgggccaaatgtgtaacgagactaaaaccccatccaagccagcggcgccaatgattggcttcacgtaccagcagcccgccgatcgatgacccgacccaacaatgactggctacggcaataaccacgtaggcagggctagatcgtgtggattcaccgccagttgccccccttgcgtgcagacgtggcacagagcattatctcatagtccgtacggagtagctccatctggtatgcagtgacccgctgctgtggaggcctaatgttggatgtatgtcgaccgttgtctgctttgtgtatggcttattatcccctatagagtacgaagtacgccgtgtaggtgagacaaatatcaaaaattcaagatgtgaatttttttccaaacgggaaatatcctcaacaacgccgatatcgggctattttgggccgatcggcgcaacgtcagagggcagataaggaaacattaaaacaagtgaacttcgatgtacgacatagtcaaaatatgccactcttgtgagatatgaacttgtttactatgttgtacaaaatgtacaacagcacttagattcacctgttcagaaagggagtcttaccagcttctgcactaccacatctcagccctttgtacatgtcaaaggagacataagcataattatagatcgtgaaccattctacacagtccatgtgatactagcactatattcaaaataagcaattcttccctaggttgctgtgtcatccctgataatgacaatgattaggcaataatcacgctaagcctagaacagggagaccccggactagaacaccaggcctaatcccaatagacagataggcaagagccagagcaaaaatccaaataagcccaaaagaggaatgaaaagaccgctcaccgtctctttgctgtctcagctcacattttatagtatgtactgtgcatctgacaccaaaacacgcgccgtccacgcttctatctccccggggaggcgtcgctagtcgatcgaagaatgcaaataccatgcagcgtgcagcccaagctggaagtatcatgtacgatgaagcagagccagagtgacaagctagctgccaagtgccagcgcaggcggctaaaagcaagtgcaagtgtaagccacccacggactgggttgctgtgcatgaaatgatgtacatagttaatcgagcctagcctaactactataaatgggtgggtgtgaatcatgtccagatcggaggttggcgcgcgtgggggtttccacattctcgaagcatgtctgccattgatattgtgcatggagcgcatgagggtggtgtgggtggatgttgcatatcgtgtcttgggtgtgtctgagatttgttgaatttgtttcgtattttgcttttttttttctttttggaggaaagggaaatttgctctggttggtacgggttgaggaatatctgggggggggtggggatgaattgggcatggggttggcagttcgcttgcaggaaacttctaaggttcttacctgggtgttcagacctcacgacttcgtagaggtacgtattcaccgctggttgaggacctgcatcgactgcaagtctctcgtgtctgtcaagggatagttcgtgtttgtgggagctggtattggcggtgggaggttggtatatcccttgattggaaattggattgttgctgcttgtattcgtagaccgattgtttcccgtgggaaaaatgcgggaataagtttgaaagatctggtctcgaccttttgctgggagggttggtagaagtcttgttctatgcttatgcagcaccgatctcgatctgataggggttgttgcgatgataatgcaatcgcttacgcacagcggatcaatgctgatagtgtcggtgcgtcgactcgaggggacgggcatttctgcagtgttctgtgctatgtactccgtagacctgaacgcgcttctagaaggcgtggttggtgcagtatgctgtcttccgttgttcatgtagggatgctacggttcctgctgatagatcgccgggatcatatctgtattgcctcaatacgatatataagtcaagctgtgcgcggttgagccttaaacttcgatcaaaaggaatgatcagatatcggtattgggtcccgtagctctttcttttttttttccttgctctagaagacatagaagatcttcaacataacccatagaagacatcataaaagacaatatagaagatgacttgaacgtgtcaacaacaatggacactacggagtagacgtggcctatatttgcccggaagacgccattcattagccgatggcaatccgtaattttattcgatatgaaatgtagaagaaaagccgaatcatacattataccttatagcgtcgggtcaatggatgtttagacatgattcgagggatatgtcttgagatgtgtgtccccaatatatatcccctcctcaaggtagaactacgagtggcatacattaaaatggaaaaaatctccaacaaaagacatatacattcactacagaagaaaggagcattatttgaacgaaaaaagagtgtttgtccattgaagtaactctaaagctaacaatatcccgacaaagttctatacccgacccaaccatattcatcatgttttttttacatgcatatctcatgaaacgcggatagcataatcacacatcagggctggtaaattcatcgcttaccagcctgagaaaaaatctgttgccaaatgtcgatccattgctgatgcttatatgacaacggacggtgggggttgcggaaagtgatcgaaagaatctcgcgcaggcggctattcaggatcctcaaagctagcatagacttccaatctcgcacagcgaatcggatacggtttgcgtcaatggagacgacaccagaatacatctgtttggcggtggttagcttattgcctaagaaatggggcaaggaaacgcgaagaaggattgctgtcgtcgtaccttgaactcggcatcaccacacagtaaagctatagcaaaatcgtccactgcactggtatcgtgcgcgttgaggttgcgagcacgtgccatgatgctatagtatgacagccatttgacagacgaatccgccctcttgttgacagaaacagcgggcagtgtgactgtctggttgttgccaacgttgcgccagcccttgccttcgcgcgtcagaagcttagggtagaaactccaggcgatgaccgaattgatcacagtatcattgttgctgttgatgtcgaaatcttcagggatgatgaagaattggcgatttcggctgttggaacgtgcactttgggtagggttggttagcaattgttaggttgaaatgtgacgtttggacaaaagaatctcttaccggttgagggccgctttctgtgatgcatctagggtcagaagacctgcatcggcaattgacactaccaattgcatcttgatatcctctatggccagtaatgtctgcgcgctgaggaagttctttcggcagaaagaatattcgttggaccccggtgtgcttcttgtgcgcctccaactacaataggcgttgtatacggtcaagagatccgagtcacctagtatttgttagttctcaactgcgggagagcgatatattgggacagacctcttcggaaagatgcccgagcaccatcacgttgtgagttagatccgattgtgttgacgaatggcgacttggaagagaggatagcagcaatgctgacagtcgcatccaagcaccggaaaaaggctccatgaatgatcattttgccgaggaagacatccagcggcaacttggcgagttgtgttccgagagaggttaaactctcgttgctcgtcagggccttgacttccttcagtgaatcaatggcgcggcgaatgtttttagacgacggcgggtcaagagcttcgaggagtgtctgttccacttctcccagtttgcagatcttgacacgaagcactaaatcctgcaaagaaaggcgcagcaattcgggggtttgctgttcagaaagcaacttttcgtggcggtgtttagtaaacaggtggaagcagataccgttctggacacgtccagcacggccgcgacgctgcttagcgttcgcacgcgagatgaatgactcaacaaggcgggataattgacgtctctcatcgaagcgcatgatcttctcctttcctgcgtcgaccacagccgtaatatctgggatggtgatacctgtttccgcaatgttcgtcgcaataacaatttttcttgtgccttccgggggtacgttgaaggccttttcttggtcttcactggcaatcgaagagtgaagtgtatggacgatccaacccctctggaacatgggctcagacaggatctcatcgttcaggcgacggatttctgccagtccaggcatgaagatcaagatcgccttgctgtagtgagtcatctctggggccgtagcaatcttcagaagtaacctcttgattaggtcatagtctagtctgtattcatcgatgttgataacagtctccttggtttgtctagaatacccatcaagactggcttggagacctcctgtggtgtcggcatctgtgggtgggtcatccatatcatcgtcgaggactgtgtgctgggcatcctccgacaaacggtagttggtcatctcgaccgcatcctccaggtacttcatctccacggggaatgttcgccctggaatgttcagaactggcaccccaccgagatagttcgaaaaacgttgcgcatcaagggtggctgacatgaggatgagttttaggtcaggccgcttctgcatgagtcgtcggagcacgatcagaaggaagtcactgtcgatagtgcgctcgtgaacttcgtcaagaaccacatgagtgatgtcttggaagtcatcgggccgttcgagcattcgtacaaccacgcccgtggttctataaaccattagttgagcgaccacaaatgaaaaaacgggagaaaagtgagaacttacgcataaatcaatggcgtggattgagtaaacttgctttccaaccgcaccgcaaatccaatgagagatctattcgtgcccacgtcgttcttgctctctccaagctcctcgctgacacgtcgagcaagcgagattgcagagatacggcggggctcagtcacatagatcttgcatggtcggccttggatcatctcatgctcgagaatgaatgacggaatctgtgtactctttccactacctgtttcactgcaaatgatcatagctcggtgatcgtcgagcgtactcaggatctcatctttaaaaccccagattgggaggttcattctaccttgcatcatgcggtgataggacggtgttgacgatttagcaatccatgcttctttcaagcggtcatcgatacccgcgtaattgtcacgcgtaggtcccttcatcggggtgcccggcttgctaccaacaccgtttctcttccggaagttgtcagatagaacgacatcatcttcgaaggtgccttggttctcttgaatcaaacgcttcaactctttgacggtggttttgtcaacttcatcttgttggatcttctgcagtgttgcaaactcagtccagagttctctccaaactgccggcaaccgcaagtaggccttgccctccttggaattttgggggaacaagatgaacaaagccagagtcgacacgtacccctccgcctgctgcgcatttggtgttgcaagggcatccattgacacaaaagtagccaaggcattcgacttatgtgtaatcgattccactgctagcgggaatggagcttcctggggcttcgaccatcgcacctcgagagcttttctgttcgaatgacttgaagaggagaaatcttggtagacaatcacgcatgttgaatctctcgatttgcaagtctcttccaagactcgccgtgggctcaggcctgtcgatttcccaaagtcgcggagtgtgattgaggtttgggtctgtggagcaggaatacctaaaatcgagcctgaatcctcagcttcgccttggaacaaatctccaagggcatcctccattccgtcaatcgcaaggagggccggctctagctcttcgttaatctcgggctttggctgatcttctgcatcggtcgaagacttttttttcaccgggcggcgagcaaatgaagcatccttcctgagctcgtcaagcttttgctcccatatgtactctgcttctcggcgttcgaaaagcacatcccgttcgatcttggcaatcttccgctgcactttagacgtttcagggtcatctgataaattgctagcaccgacgcgacccttctttccctttccggagcgatcgaaaagatctgggtccaagctgtaaagtcgagtctgcagctccaaccattcgggaaccatgatatctgggtcgacggagctatccgagtcgtacgaaataggaggagcaacctttgctgccttccagtcagcctttttgtttcctggcttgcttcgattttgggatgaaacaggagtcgaagtccctgaagctttcgattctgttaagagttagcataatgttccaatgaaaaccttgaacctgggggtattacctgtcatccatgaggtgacactatccgtgtctttcagttgacgagtatttatctgtgtgtaagacggcaattcatttttatcactgtgcgtagccaaccattcaattgcttcatcaaggttccacacaacatcccgaccggcactgtttgagttgccagcaaagtattgcaaaacatgcttcagtgcgtcctcgacacggttttctggaaagttgagtttgagcagtgtttccctcaaggtccaaagcttgttgtataaatcgtcctcagagccagcctgttttggacttgtgatccgtccactagctatgagatagtcatgctcttcggtaccggctagttcgagaatactgtcttgaatatctgtcggtaaccactctagaaggctcaatgatactgattgctgtcggaaaacgcggcgttcgttttctagcttagtggcctggcgcgctgcgtcatttttacacttcgcagcatatttatcaaccaaaatctgaagctctgcttcttcaagatgcttttccagctcctccggggtgtagtcttgtaacgaggaggttttttgtggtgcggcgacatctgcaatccgtatggcattgcgttcaggttgcagctcgatttctggagtggcttttgattcttcggtggctggagaaggtgtggatgttgcctctggcttaggctttgagggcatggagaccgttgcgaagcctcgagccgggttggaggcgggcttcttctttttcttgctgctcggcggcattatgtctgaattatcagcgggcctagcggagatgtcttcgaagcacgctgaaagtcagcggccaaagaccaatgaatttggcctgtgtaatattgtggactaaggtgcacaatattcccaaaaaagggcgttgaaatgtgtaaagaacgaagagtcggccatgattgtttaatggcgggatgtgatccagctccccacacaaaactctttatgacagcattcctagcccacttcaccaacttcaacactctctgaaccacccccttctctctcgattcccccgtattgaccgccgatcatggatggaattccatgggatcaggtcaaggccggggatctggatgccttgcaggtcgttctcctctcgagttcgacctcgcgcaggctccgggccctacaagaactccgcgacaagaatggtagcgtgttaatccaagcctcatgacaagcagattgactaactattcattttatagggtctgaaatatcaccagaaatcaatcacgatatactagacttgctcttccgtacctatcctctctatgtcgatcgatcctcccgacaggctgtccaacaatgcctccgctctctcctccgcggccccaatgcgaccgaagagttaaaattccttgcgcaaaaattgcaaatcgaggcatctagaccaggtttggcttcctcatttgcatttgttctgttggaatggtgctgtattctgttgcagcaggccagcgaggaccagaacacaccgttggccactgtgctagacctgattgcggttgatgccaaggccctggagaattgtctttctcacaatcctaagcctgcgttaaagcagtcagctcttcgagtgacacgacgtgctttgcgcgctgtattttcgtctaaggcatggggtgctgatgcagtgcggcagtctgtcagccgactgaccacggactctaccgcagcgtacagaaatgtgcctcttctcggtgtcgtatgtggagtctgtgcgcgactagcagacaagaagccaattcttgaagagtcgaaaaaagagattttagctttctacatcaaggaagtcgtgagctcaaaatctgttgtgcccgcacatgtcgccaatggcatgtctgacttctttacttccttcgtaacatatgaagatgttgccactgaattggtacctcccatggaaaagtccatactacgagcaccggaggtggttctcaacggcgtgattcctcctctctgtgtcgctctgccagaagatattgatatctcggaattggtgcaaacacgcctttccaagcatcttttaactagcatgaagtcaaataacccatcaatccgccaaggggcatctgactcttttgcatccttgctctctcgatgcagaaccggtcccttggtcttaaagatcaccagtgaaatcattggtcctctgaaaacgcagaagattactactcctgagcaccgcatggcttacgcccaggcaattggggctatttcgccttcggtggatgtctcaaaagaggttgttcaaggattctgccctgttttttcacgggagtcgaacgaagctgccctggaagaggagatcaattcctttagcaaacaccttacttaccttgttcaatctaagctcaaggttagcgatgatgttatcagcactatcgtcaagggtgtatcagataagcgaattcctttccgaaagatctggcaagcaagtgtgggagaagtcctatggaagtctgatctcgaggttttgaagacccctgaaattgaaccactcgtcaccaagttcctcgctaaaatgaaggatttgtttggtgaggtcgcctccaacccgcttccctcggcccaaagcggtgctttgtcttccgcttatctctttctggctctgttccaccgattgtccgatattcaagagtctgccagctccgcttgggaggaaaacgtaactcaatcgatgaaattgagccccaagccttctttcctcctcaacccgaaggcatactcaaagttgagttccaaggaagaggtccagtggcttgtcagggctctggctgctgtggcctccgggtctaagtttgctagctctgaagatgcgtccaaaacagcttgggctcagacctttatctacgcgatcaccgggcctgctattccctcaaatattcgcgagaactccgcggaaacattatcccgggtctatcagacggatgtggcctcttttgggcgcaccgtcctaaatgcactgtgggcatggatcttttcattccgaaccgcagagaaggaatcagcagccgtttctgctggaccagagagcgaacgcctgcttcatattgtcttgaaggctctctgcccaaccaaggctgtcatagaaagctccggaatttcttcttctgatttggaagtcttgctcattgaaatgctgattctaagtcggcctgagttgattccgaatacctcctggattgatttgtgcttgaggaccggcacggaccctggaaatctcgtgcgcgcacaccctgatgcttgcatcgagcagttagttcacgtgaacgcagaccccctgcagtcagcggtaccgggtgttaacctcgctgtctggaccgctggggctgaattggcatttgttgcccccgatgcaatgatcccgcgtttggtcgatcaaattaaatatgatctggacggcacccgcctatctaagttcactgccactgatgccgccatttcacgcacccccgaaggaaccgcttttatcgatgtgctcagcagtaagtcgaagcagcctgcctttgataagaacactaaggactatgacactctgaagtgggaagaagaacttcgtgcgcaattagccgaaaagaagggccaaagccaaaagaaactcacacctgaggaaaattccaaggtcaaggcccagcttgccaaggaggccaagattcgtcaagatgttttggaagaagtcaagcggatcgaaagaggagcgggcattatccgaggtctcgcaacgggtccagccaacgacgtcgaggggtggatcaacgctgcagtaagttctttgctgtcgcttgcacaggctggtgcgggtttatttgtcggtgatgttgtctcccgagcattcatcacttgcgccgatgaggtgtccacccgcctcggtcctctgcgttctttcgttggcattgcaactctgcgagccatcggtaataccaaccttccctctgacatggaattggaacccctcggtgaactcgtgaccagaattctctaccgattacgttttgcttctgagcagcgtcctttcgataccacgtctctcgcctacgtgcttccgcttatctctctgattttgtcccagaatggcattgaagaagcgaagggagaagaagaaggcacacaagttctccttgctcttgagttcctgtcagctcactctggctcttgtgagttttaccccacgctaaactagtatgaaaccaagtgctaacgctgttatagtcaccgacgcccgtcttcctcgcgttgaggttctagctcagcttctctccgccatgcaaaaatacacccagcactacaagctggtcaaggataccttattcgacttctgccgatgcatctcgccgaatatcagcagcgaagagctggatacgctcttgcagggaacaattgtcgctgatgcctctgtccgaacaactgtgcttcaggtcattgaggccgagattgatttgactgacctcgatttttcagagcacatctggcttgcctgccacgacctggtggaggagaacgccgagattgccgacacaatttgggaagacaatgcgctagaggtggatgacacctcgttcagcaagatcatgaaatacttggactccaaggactatcagcttagaggcgctgccgctcgcgctttggcacatgccattgagtttgataagagcaaatttgcgggcattctttccgaactgcaatccaaatacgtggaagaaataaaacctaaagcacccgaaaaggacgcttatggaatgcccaagaaagtagacaatgcagaccactgggaggctcgcagtggtattgcgctggctttcaatgctatgaccaatggattcgatggtgacgagagtgtctcatttttgcgattcctgattgagaagggtcccttgctagatggaaactcccgggtccgtggccagatgacagagagtggtaaatctattatcattttgcgaggagagtcaaaggttgaggagatgatgaatttgctccaaacaaccctggaaacctcggataaagacacgaagacctctgacctgctgaacgaggctgtcatcgtcttatatggatctgtggccacacatctcaaggcggatgatcctcgcttgcagacagttatcagtgaactgcttgtggccctcgataccccttcggagtctgtgcagcacgccgtgtctgagtgtctgccccctttgatcagatcgtctgattccaagacggcagagtatgtggaaaacctaatctaccggctcttcaatgcccctgactatcctcgccaacgcggtgctgcttacggtcttgctgcagtcgtgtgtggcaggggtatcgcaaccttgcgggagtaccgaatcatgacccagctcaaggaagccgccgagaacaaaagagaaaaggatcaccgacgaggcgccttgttagcttatgagcttttcgccctagttctagggcggacatttgagccttatgtgatccatctcgtaccccagcttctgggaggatttggtgataccagcattagcgtccgcgatacttgtttggaggcttcaagggcttgcttccagaatctcagctcttacggtgttaaggagattcttcctaccctgctcgacggcttggatgatacgcaatggcgtagtcagaagggtgcttgcgatctacttggagccatggcctacctggacccacaacaacttgcagctagtttacctgatatcattccccctttgacaattgtgctcaatgacacccacaaggaagtccgtagcgcagcgaatcgcagtcttcagcgcttcggcgaggttatcagcaaccccgaagtaaagagcttggttggcgtgcttctgaaggctttgagcgatccaacgaagcacacagatgaggcgctagattccttgatcaaggtttcttttgcgcactatctcgatgcaccctccctggcccttgttgtgcgcattctcgagcgtggtcttagtgaccgatctaacactaagcgaaagtcagcacagattattggtagcttggcccatctcacagagcgcaaggatcttatctcacacttgcctatcattgtggctggtctcaacttggccattgtcgatccagttcccacaacccgtgctactgcttccaaggcccttggttcactcatcgagaaactcggagaagacgctctgccagatctcattcctaaccttatggctactctcaaatccgatactggtgctggtgacagactcgggtctgctcaagctctttcggaggtccttgcaggcctcggtacgaccaggctcgaggagacattgccaactattctccaaaacgtttccagtgccaagcctgctgtccgtgaaggcttcatgactctcttcatcttcttgcctgcttgcttcggtaacagcttcgccaactacctcagcaagatcatcccccctattcttgctggtctggctgacgatattgaggctatccgcgagaccgctctccgggccggtcgtctgcttgtcaagaacttcgctcacaaggccatcgatctcttgcttcccgagctggagcgtggtcttgcggacgacagctaccgcatccgtttgagttccgtcgagctcgtcggcgatctgctcttcagtcttaccggtatctctggcaagatcgagggtgatgaagaagaggaggaagccactcaagctggccaatccttgttagaggttctcggagccgagcgcagagacaaggttctctcggccctgtacatctgtcgctgtgatacctcaggccaggtcaagagtgcggccctgggtgtctggaaagcactcgtcgcctccccgagaacgctcaaggacatggttcctaccctgtctcagctcatcattcgccgcctcgggtccagcaacatggagcaaaaagtcattgccagcaacgcccttggagaccttatcaagaaggctggagagtctgttctcaacactttgctgcccttgcttcaagatggtcttcagtcttcgcctgatgtggaggtcaaacaaggtatctgtatcgctctccgcgagcttatcaatgccgcttcccccgatgcgctggaggactttgaggatattctcatcgccaccgtgcgcgtagctctggtcgacaacgacgatgatgtgcgagaagctgctgctgaggccttcgattcactgcagcaggtcatgggcaaacgggtcgtggaccaggtcctgccttaccttcttcatttgttaagaaacgacgaggaggctgagcaggcgttgtcggcactgttgacgcttctcacggagcagactcgcgccaatattattcttcccaacctcatccccacattgctcacgccgccaattactgctttcaacgccagggccttagcatctctagccgaagttgctggctctgccatgacaaggagactgccagcaatcctcaactcccttatggacggtatcatcgacactaccgacgaggagcttcgaacagaactcagcgccgcctttgacaccgtcctagtgtctgtagacgagtatgatggcctgagtgccgccatgaatgtaatggtcactcttgtcaaacacgacgatcaccgtcgacgtgctgctgcggcgctccatctgaccaagttcttcacggaagccgagcttgatttctcgaggtactaccaggacttgatccgcgccttgttgatttcgtttgacgacccagacaaggatgtcgtcaagtctgcatggactgccctcaccggtctcatgtctcacatgcgcaaggaagagatggagagcttggctattcccacccgccagattctgcgacaggtgggtgtggctggcgcggacttgcccggcttcagtctgcccaagggcatcatggctatcttgccgattttcttgcaaggtcttctcaacggtactaccgatcagcgtacccaatcggctcttgcaatgtcggatattattgaccggactcgtgccgagtcattgaagcctttcgtgactcagatcaccggtccgctcattcgtgttgtgtcagaacgttcggtcgatatcaagtgtaagtcatgcaaagcctttatgtggtgtctgtttactgattgattctgccaggcgccatcttctatactcttaacaagcttttggagaagatcccgttggctgtcaaaccgttcttacctcagctccagcgtacattcgctcgtggtctggccgacacatcaagcgagactctgcgcaaccgggctgccaagggtcttggtatcttgattacgctcacccccagaattgatcctcttattgctggtaagtctcaggaattttttatacatgggatgtagttcatcgctaacttttatctctagaacttattgctggatcgaagaccactgacattggtgtgaagaacgccatgatgaaggctctccaggaggtggttggtaaggccggtgcaaacatgagcgaggcatctcggcaagcgatccttggtctgattgatgatgacgctagcgaccagaccggtatgatcattactaacaattcacctgtttcacagctttctaacctgctcacagattccgtttccattaccaacgctcgcctgctcggtgctctcgtgaaggtcctccctgccgcaagctcggttcctctcatcaagtatgcatattcgttttcatggtttgattttgttggatgctaatatatttccttccccctaggaaccgtattcttactggctccctttctcatgcagcgatcctaggactcaatgctctgttggctgaatgccctggggttctgtcggaacacttctctgtcgagcttcccaccgtcatctgccaaggtcttgcaaacaaggatgtaagtggaatgctataccacccagtattgcttgaagctaattcagaaacagcccttcatctccgacaacagcgctcttgccgcaggcaaatacctcttgtccaacgatggcaaccatgctttcgagtcaagcaaggccatcttcgaggccttagcatctgccattcaagttggcaacccggtcgatacccggcggttgagcttggtagtcatccggactgtcagccgtcttcaccccgagctggcccgtcctcatctggctttgctcgcaccgcccatcttcgctagtgtccgtgatctggtaatccccgtcaaactggccgccgaagctgcattcttggccatattctctgtggttgaatctgatagtgaggtgtttgacaagtatatggccggtccaggtgcatctctcccaccaggccccaagcgcagcatgtctgattacttcaagcgcattgccgttcgtttggccaaccaggcgcgtgagcgtcgggaggctgaaggtggtgagggtggcttgggactgtcgaatgatgaactagacgacgaaaaggaattgtggagcattggcaaggttgaccttggagaggcctttggcgatgagtgatgatctgtttgcgtatccaaggagcatctagatgtttatagatatacccttgggttttctttgttcgagtcgtacaaaagttatgcatagtaagtttttgtatatttatattgtgtcattatacatcaccgggcagccatgtacgccgtacagagtggtggactttattatattgcagatcactctttcctagataggaatatcaaatcaggtgatactacttgtcttcagtatcacgtgatattgttcgttttttggccgtctacaacgaaagccacggcaaagagcgaaagagaaaaaaagaagagaaccccaaattgtaatcttgttattatcccagcatcttcattcgaacttttcccaatgtaagtaagcttagcttccccggactgcaagatcttcaagctccatcatcccaattcggactagcgttagggtatgcaccctggagcactccgcccattgtggaaggagcactcgcttagccctcggctgacctaatctggcccgcagtgccctctcaaactctcaccgtcgggatttctcagtgccacgaacatcatccgccaacgaccgtcgatacgccgacatcaagatgtgagtcccatctccaagctgttcttgaacttctcgaatgcactcccgtgtgctgtggagattcatgtcccaacacccaactcgtgcacccgaaattttcgttatagtggaggaacaacttcgtgatgtgtgtgctatgatgctgaccgggtctttcaccaccacagggtcaaccttaccacccagaagcgcctcgccgcctccgtggtcggctgcggcaagcgcaagatttggctcgaccccaatgagatgaacgagatctccaacgccaactctcgccagaccatccgcaagctcgtcagcgatggcctgatcatccgcaagcccgtcaccatgcactcccgtgccagcgcccgtgaactcaacgaggcccgccgaaatggccgtcaccgcggtctgggtaagcgcaagggtaccaaggatgcccgtatgcccaggtatgcacaccaccactaccaccaccgtctttgtctcctacatcggactcgcccgacggctagaaccaggacacagttgctgatgtcgattttctctgtttagccaagtcctctggatgcgccgcatgcgtgttctccgtcgtctgctcgtccgctaccgcgccgccggcaagatcgacaagcacctctaccacgagctttaccacctgagcaagggtaacaccttcaagcacaagcgtgccctcgtcgagcacgtaagttacaacccgaatcaaccccacggatgacgatcgaatatgaacatgaaccccttgaattacgcaaaggaacggatccaggctgactcgttctctttttcaccgctacagatccagaaggctaaggctgagcgtgcacgcgaccgtgtcctcaaggaggagatggatgctaagcgtgccaagaacaaggctctccgtgagcgccggttggagcgcaaggatgccaagcgcgatgctctgatcaacgaggagtaaatctgatacaaaaattcaattgcccttccgttgtttgacgcttttctcgcaattcggcggtccggaggttggaaacggttaacttctgggttggattcgggattctaggttgttcccgatatcaaactcaggtcggccttcggcatcttcctattagtctagattctgttacgactttctctccttccctttgttttccctgatagcatggggttcgtgaccttattggatcttttcggaaaatatggggtatgggaaataggaagatgcgatgatgatgtgatactcaagctattcttgttaagacgtaacgagaaagcaaaaggaaatctttttctacttcaccaaaaacccgaaacaaaaaccgcatgctctttcctggtctatactaccgcttgtggtataaacctgatatgcggagaagcagattgtgtccctctataagccagtagataccattccctcgatggtcttactcgtatactccctatactctcaatcttgctgctcgtgatcagcccctgtagctgacctatgagtggcatgtctattttccatgcttcatgcagactttatctcgataattccacgatccttagcaactgcaacctcgtgggtcaaagacctccaatgtaatttatggatcctgtacctcccttctagggatttgatcacctctatctatacttgatagctagcctacaacattgacatacgttttgtgtgaagaataaataaatcaaaatctaaccagtcgaagtatcattgccgctgaatatgttcatatatatctgtaccccacattcccataatcgtccgagtataaaaatctatgattagcagccaaacatcggggcgcaatgaaagtacaggataatatatgaaccatagggtagccatcgcgttcaactaattttgaagtatcccaatgacaattagacaactattttacctcgagcatggtttcatccaaaccccgagaatgtagaacgcgactaatttcaccaaccgctagaagaaaatcaggaaatgaaagcatggtagagatatgaaatactatgccttggaaagagaaataacattttgagttctcctgccctttccataccaatataacccaatgaactacccagacctacaagttcaacaccgaaatcgagatgaaatatgaatgggcccgaagggaatgccagtaagcaaataaatacaaacaatagaagaaaagaaaacctacagacatagcattcgtaagatcttgccgtcgtaaaccaaagcaaagccaaaaaaggcaagtgtatcagtgtaaacgtataatatatgcaggaagccaaacccaaaccgaaagaaaatcatgaagcaaaaccaaatccagcccgaactacaacttgacagcccacatagtcgggatcgaaggaaccgaagaccggtggtgagcattgggcggaggctcaagatcaagatcgaaggggtcactgcgcatgctatcacgcatcatagacgcatccaaatatccatgcggtacagcgagggaatccgtgcccgcacgctcgcagtcccagtgcccttgctcacgaagcccggcgtcgcgggaagaagtggagtagagcgagaccgatcgagatggggctgagatttcgatgattgcagacggcgggtttgtgaaggcctcctgcgctgtctcgccacgcaggtacatgctgtccagagataggtctggattggagggctgttgttgtagcggaatgactgggagtatgggtgatcgcgggccgatgtttcctgggatcgaggggtaggagtggtagcggtggaagtggtggctgattgatgagctcgttgagtcgcctcgtattagtttctgtctgagtcctagccgctctgttgttattcttcgtcgtcggtgacgcatatagagtgcgcaggctagcagggcgaatatcatgattgctgatcctccgatgatgctcccaactatggttccgattttagaggatgcggaactcaaattgtcggcttgggatgtttctgacgagtctgcgaccgtggcagttccgatggatggtgggattgaatgtgagtttgatggtgcggtgctcaagctggccaaggtactgatggaacttgtcgagcttacggagctagtcgctgtctctggcaagataggcagtgatgatgaaagagatatactcgggctagttaatggaaccggtggaatccacacgctgccaggagcatcggaatgccatgagtgatggtcggaggattcagaagtcgccgaaacccccatctggcttggtagaaccgaggttgttggaataagagtcgaaattgggggctccgagatatcaggtgctgtgatggtggtgtcctgcttaattgtccactgcgtagtcgttgccagagtcacggtcaccggggttaggtccaatgttaacgataggaagtcaagcacactggccgcggtgctggaatcagtcccggattcagatatcgtgtagacccatgtaggatggacagtttgcgtttcaattgacgtgactgtcaccagatttaaaggtccagaggataatcgtggggacaacgtctgtgtgaagttgttgagcggtacagacggagtatcaatagcggaagaagcactcgacatctcgccgagagcccgcagggggcaccgaccgttaaaaggcagatctgatgatatttgccgagtccgtattcgatgaatgggacataggggcgacgtgaaaggatggatccctttgtatgcgtattggacaaagcacaaagtgacaaagcaaccaacaaagcagtaggcttattaagttgactctgatggttcatccaagccacccctatttcttgttttgttccttgaagccttgagatagtcacgaacataatcccgtcgcaaggctgggattccatacagttcacgattcaccttcgtggtccaaaaagtgtatcatgtcagatacagagagattaaaagggtgtatacagagacctttgttttcccccgcagaatttgtgaggggattttgcttttcatttgtctagagctcggcgcttcttgtgatgggtagaagcaactcctgtgacagatgaacggcgcttagccctcggtccaataagaccatcaggcaatccacgggtggacgatcatctccagaaaatatgggaatagaatatccataatgtgacactggctaaattttccatatgcgcacgatctcgtcattattgttccctaggtaggatttgagcggggatgtgtatcatgtatcatagacgaaacacggcagtttcggatttggcgagagttttattgaaatttggactggtccatcctggtgacttcttgaagtttcatgttttgcctagctcggctgttggtatcttgcaggcttttgcaggttttgcagttgagagtatgtcgtcggcatagaggaatcgtagcaatgcctctttggtagagtcatgtgactatatccagataagtaggagcagtccacatgtatataatatccataaatgatatacgagaggaaagggagaagcaaaagggcagagactacagtactagaacaaagtacggagcaagtatgtaggagagagagtgtgatatcacttttacaagaacattcccccctcctctgttgacccgatgaaagccctgacgaactcagtcatgaatatttcaagtcacaaggaaaggtcaaaggtcataagacatataaatggtagaatttatgcatcaaattcttttgttaagtcggagagcgctgaaggacaaatgttcccgacaaattccccaccaaaagttccccagttcctttcatcttcttccatctctcttctccatcacttcatagggaagttgtttttttcttcgacttcaacttctctgtttatttacctgccaacttatctcggtgcttgtgcctttggtgcctttggtgcctttctgcctttctgcctttccgccttcctgttccctgttgtgttcccatgtgaccttggggactagaactttgcgataatcgtgcatttgcatttgcattagagctgtgattgaagaatgtttggctggggttctgggctaggtaagcaatctcccttttgctacccctcgatgtttcccctcccccgccatacccctgtggcaagtcgaaatgtcaacacaagttcacctggacagccttgttggattggagccctgactgtggcttaaagttctatgcgaccttagatatgtcagccagacttgaacgagagatgaaccacacagtctcaagctaacacaacttcgcgatagccttgccctccgccacttcagagccggagaaggaacgcagaccccccgcagacccgacacctctcgatttccccgtctataacctatccaatgtactcgaaaatgagtcggaatcaagactcaaggagatgcccgaccttttggccgacatcaaacgcccacaggacatctgcgtggagcgcttcgagccgttgaacctacaattggaaaccggcgtcgaggtcgcccatatgatccccgaagaccattcgcatcccctcgcccccttgccatgggaagataccaccgaaccgacggaagacaatcacccaccgttgatgggtaacggagccccgtatccctcgaaggaacgatacgaagtcctggaaaaagagctagcgttggataatgacgacgctttccgcgaggtggctcgattgccgccgcgtgagggtcgcgacagggttcgtataacacagtcaaggaagttctggacgggattggagcgcatggctcaatactgggataccagcctagaccattactacgagcgcccggcaacccccgatccgacacccccatctgagatggagcaagcaggggatagcacaatgcagatggatactgaggagtccagtagcagacatactctgacagaccatgaaatggacctggatgaaggacagacggtcgcgccttcgaccagcggcaatgttggcgataagcagcggccctctgtccctgtatacacgggtcgccgaattggcaacggtgccgagatgcccgatgaaattcgtgacgagacaatccgagcctttgtggagatggccgcatggccattcggatgccaggtcacagtccccacgctccaaccacggttgactaccaagaacctcctgttccccgtccggcaaacattccagtcctcgcggtccccgcgagaccgccagatcgcgcggagcggcatgctcgaaggccccgttctcatctcacagtgtcgacccgagacatctttccgcactgcagacaatacccccgggaccgggattggcgatgtaagtgatttattccgcgaagtaggcggcatgcttctcgcggcgcaagagcgtgcccgcgaaggtgcagtcgagaagcgacccggcgagggcaaatggtggaccatgcagcctcgcttcggaggcgcccccaacgatgggatcctggatgatctcgttaattacggacacgggatgtccttgccggactcaatgatggaagaaagcacgtcatctgcccaggaggcagagagcgcttccaaacgtcacaagttcgagcatccatttgtcacgtctctctcccggagaccgagtgctatgcgcagacttactaccagtgagaagtggaagatactgcagcctggacctagtctttgggacaagcggatgagttatttgcagataggcaaggtccaggagagtccgtttgacgatgtatgcatacccggcctcgttcattgaaattgagtgtgcttttgacggccagacaaagctaacccttcattcttttttttttttgcagatttacatgatctcatctatcaaccatcacgtctcaatcctccacctccgcgttcacaggcggtatttggacatcctcacccacggggacagcaccttcccaccaaccgaaggcgagccgtggcatgtgctaaagctgcagaggactcgatggttcgacctattcgatgccaatgaccgcatagaagcgctgaagggtgtgtggcaactattccaccaccagctgagacagacacgccacgaaggcgacgtcccaataccgaaagaattacctttagagtgtccattatagagcatgcatgatgctgtccgtggggacatgcttttgactctccggctctcagtggcctttctcaagcgatgcatcttgtacatatggcgcagcaatcttcggattcttcccgcttgctgccgaccttcactccgttttctacaccatacccatcttcaatgaatttacaatcttgagcatattgatatctggcgggcaatttatatcgattcataagtgatatctcttttcgactggagggtggttagatgggtgatttgggatttgtgttctgctttgatatgcttctatggatacatttttgatatctctgttttatttgtggacaacttggtttgatataatgcgtacatatggcgagaccttgacccgaaattctatcgatctgttctcagtcaggaggatccaattcaatcacaaccatctatctatgcataacttcggagtgtataaatcaagtactttctcacccattcaatatatctcttacactgtgttgtcgtaaccatccattttcactgccataaaatccagttcataggtaatccacatcccaacatttgaaccctcggtacttttgtcatagtgagaccactccaatcctatacgaaatcaccaaccctcacaacatcatcttctaatgaaatcaaaccaaggtgccggacatattcggcgtcaagactcaaaacccatgacctcacacaataaccccgatcatcaaatctcgccacacaccaaaaacgatacaagtaaaaaagcgagagcgttccagaccagccaaaagccgaccaaaatgtgatatgtccacatgatagtccctcttaaccctgcttcggttgtgtatggcgtagatggtaggagagtggagcataaataagtgggcgccgataccctttttggtgatatttcccgatctttttttctaacttcgtatacatactccgtactatacagatttacttctaatggcacacgtttccggggctgcagagtccgggcttgacagacccgacattccctcccgtaagtttctcggttacggggttcgcttgttgcggaccgggataaggctgtgtatacggagtactatatatgccctccgtactccattccctgtctgtgagctggctagtgggatctggttgcggtgagagtcgtgtgtggcaatagatcttcatttggcttttgtttcagggtctgataggccttggtgtggtgaaataggagctggttggatgccttggaaagaggaagcaagaatatgcaggtggatttatccgttgatggggttgatttaatgcttgtttccgtgtatattgtgtgttttaagcacaagtatatacatatgtagttatacatcaacggatttcgggatgggtcatggtgatgatatgtatagaccattccatgtaaatatttacttacaacatactccgtacatgaaatgattaaaagtccaagccacatcatccaaggctaaattattcggtacacacttcgtattctatataaatcctatcattcaataaaaccaagtcgtattccatacctaattggcctctcccaatcaaacccagagaacccccaaaacccgggtatcaacaaccgccagctgcaaatcagatcacatcacacgttcaaaacaaaaatcccaacccaaatctaactagtcctgggagcatatgacccgcctagcagatccataaccccctaagaacagtagagacatgggaacctcggcacggaagaccgcctaatgtggactagcaaaagtatggcgcgtacccgctttactgcaaaagccatgtggaggccgtggagagtgaagattgaagagattcgtgttcccgaggaccaagagaatgaatcgcggtagggtgtatgagttatgtacttttaaacaagagccagcacttgaacagaatgtggctaaaaggctaatagtaggagcacggaatacaagagagccttgaactcagttgactataatggtagtataaggtgatcaaaatgaaatataatatacgagtaacccaacaatctagttgtttggtctgatggattgaaatgtatgcgagtcgcttcatcgaggacgcgttggtgggggtgtatttgtaggcaagtacccctggaggttgacaacctcaacttcaatcccaggctactgcctaatagagaaatacatatgcaggagcatgacttgtgtgtgtgaatggtatgcataaagtgggtgtgattccaaaatgtcggatccgaatactccatacagccggtaggatagttacgtttgaaatatttgtccttcacggcaaggtacacagccgcgctaagaggctgtcggcggcccggcggacggtttactttgctgtagtacgaggtacggaatatacagagtacggagtacaatagggtgggaggccgctagtagccaataacttctgacactggccggccggttcgaaatcggactggactctcctctccttccaaaagggaattgatagtagctcacgagaccacgatattggttggaatcttgactttcgtgacttttgcctggtggtgggctagagcctctgcaagagcacagatcgggatcagggcgccggtcttgttcttcagttttttgttttcagtttcccttgcatctgccgaacggaccattggttcatgtgagtgagttgggtctggtatttaagcctcaggtgtttgtattgaattgctactcaagggatgatgcagcgtaaggagggttgtttttcatatgcatctggcctgatctagccctaaacttgatgaccttgcggaaggcggtagctttgcgccaggtggcggggctggtatagacaagtgaattgcgacggaatatgacaagtagggggaaaaggtcctccagactcaaaggcccagcgataggtcaggccaagtagatcccactatgaccacatggaaccgaacccacgtgggagagcatccagccggacttcagtggctaagaaggcaagtcagaagcgatcttgacgtatcagttgcacagaccactgtagaaacagggcgctcaaagttgagacgagatctcacgcacggtgaaagtctgtgttgtacaatctgtacacatcacatttcccttttgtggagcgtggaggttatgaaaccgaaccgtgtcgtgcatgcggggatgggcggagaacgaataacactagattccaaattgattggtagttccaaatcaaccttttgagatgagctctggcagatttacgaatctgtgtttgctatgcagaggagcgggagagccccgatcgtgaataatcatgtcgtgtcccgtgaaattctggattccatttcgataatgccagctaagaggcccacgaagcaagtctaggctgcccgcataactgatcatctaatgtacagtggtgatatgtctagctaactagttgactaactatggaatggaggtgatcacattttagctgaggcggcacaaccaatctatggacgaatcacgcgcttacatcgccgatgaggcctaatgatttgagattctaatggacattgagatatcgtattgccaattcacctatcagtattgtgaagttttcggcctttcagcattatgtacgatatatacccggatttcgagaatcccagaatatactctgtggactagactagtaagaacccacgctctgcataatcgtgcgatatgtttctggagacaagacatggaggttggtgggctggagttgcggttgcaatttggttttgaactttgtcattggcgcgtgtcaacactccctttttaggctatacttgtccctcactagccttacgataaaagttacaggcaactacgtcaatatgatatattgttgatgttgttgtaacacagcatgtccatgcatcttgttccatccctatctagatactggaggtttaagctgcagcccattactgcctaaatatgccaattgcacatcagagtctcagtctaatgcgaggaactcgacctattccgcgaccgctatgcaatcttccgtgttgcctcccctcgatcgatgtggggatgtttgtcaagggagaagatcgcctgcatcttccccatacggagctattccaatgcgaaggtgatcctccgtgctgattggatgtgatttaggtctgctccatacttgttcagattctgaggctttttcggacgcaaatctccacgcagtacggattactcagtactttcaactatatttctaggtatagcttacttctgagtgctgaacgtgtaggtgggtagtagtgtcatcaaagctcgagcctggcgttgcggtgcgagctcagggattgaggctctaagatacttcatagtagcattgaaagccaggctatgacataggtgtgccattgagagactggactttttttcgtttccagatagtgatcatgtcatgttgtggttaccccttgcgttcgacattggatatctaatgactttgcaaactctattccagatatctacatactgcaagatgcatggcgtgcagtcaccatctgcacgatgtaggcccgtgttattttggaggctagatctgttttttcaatgtgttatttccggagaggaataaatagatgcctgatatattttctttcattcctccttccccattaggtaaggaaatagcccgtgccgattcttatgatacccactaaaatcaagactttgggcagcgacgcgtagccacagataacggagacccgaagatctaaaccaatgcgccgttccaaacctacggaatataatagtggaaaggataatggaagcggcagatcgacagggcgagtcaaaactggaacgcagattggatactttctatgctgctcgtgattgaaatccatgtaaccccgataccccttaacggtggcaagaacttgcgattcagctgtcaaccagtgggatgtcttggaattcgcaacggaccgatgaaagatcattgcgagaatggactttgcttctaaggttaggttcggattgtttctcattccgacttttcaactcagattccgttcatgcaggtcaaatcccgtactcccatgttaaagcatacttgatatggaagaattacttctcgatgccatggaggattggaattaatcaaggaacatttgaacaaacaaagaaagaaaatcatcgcctaacaaagtcttggctccacgcggactatttgcactataagtagccctaaaatttgtatatatccacacttcatacactacccactatattcggaatacactggcatacaccgcgaacttgtactccgccacaatccttcaatccttcagcttgattcttaagtagttaaagcgggtggccacacagataggacacaaattaacggtcaaaagaaaaaaccaaaaaaacctccaaaaaaaaccaggaatgcggaggcaactctgtgctctcgtgccactttcaatcgcgcgtttgactcgctcagaagtcctccgactagggaacaccgttaagtcttctgtggcacggaggtcttgagctgcatcctgatcaagctaggggtaaactgtgttactgcctaagttgggaaggaagtgagttgctaaatgaacgtgatgtagtattcgtttgatgccaggctctaacacgatctcgggcagaaacgtgattaaattggacagcatgtcaatccaatccactttctatagactagaatggtttttggagtacgaagtagtcttctggaaggaaacccctggaacccgtggatggttcccgtcgtcatccgtggatgggaaaacgggtaaaccttggaacccggttttactatgtcaggtatttatggtaattaccatcccatttcatgtgtctactaactatggcatactatcgatgtacattatactccgtatatgttataattgtatgttattgccccaatatagatttcaaattcagtcgaagtgtctttcagagtggatgcccccaaagtgtatctcgattaaacggagcaaggtgcccgtagccctgggttgctgatcagccccgacaaccatctccctgggaagccacgggataaggtatcccttcgagtgactagtacgccgcggtggctggaagctttctgccaacatcgccgatctaaagctgcatatccactgatttgagaatcgagtccgaacagagtttatcttcagtgttttagaaatgaagcgccccttgcgagttatgtttccgagtctatgaccgacttgacggccagtgcggcgtgtgttattgggtgcttggggcgttgaaggatattgttcttggcatataacatacacctccactgcagtttcggttatatactttccgtgttctcttggaagataatagtcatagatatgtggactgatctagatatcttgttctaagagtacccgagtcctgggtactgggcagcgatccctgtccgacacaccggtcacatggtaatgaagaagggaaaaaaagaggattattaggtttagaatcaacctcaaacaccgatgttatcactctattcttgaaatccgcccaggagtcctcatcctaagccataatccaagggcaatccacccagtatacgtaactctcggaatcaagttgcatggcgcatttcccggcgaagcggttgaccttcgggcggcaagttcgatccccgttccacgcggaggatcctagcttcgatcatagcacttacatagtattctatacaccatagtctatcacatctagtgatggggtatccatatacagacacacattgcatattgtaactatatcctaaaatgaggacactgttaatttctttcctgcagagcatctcatattttcccccagccgccggacccactgcctggtaaatccagcaaaaggaaacaaaaagcagacctgtcaactgtaacttgtaagtattgtactccgtaagtattagaggttggtgcttcttttctcaggggtctatatggttattatatactctgtgtgagagatcaatggtcagaagaagtcatcggggtcatttgataatttctttttctttttctttttctttattttccttaatttgtgtccaaattcgaggtatttgatagtcaccgcgattctcaagagcatgtatttaatccagggaggggcaaacaccgctgtcgatccctacaggcgtaattataaccaagtgtgttattactttatgtcccccctcccctcctggtttagatcatttctccccttttgtccgattcttgattttttttcccttccatagttctcttttcgataactactgggacgtgatatatgtacctcggacttcaactcacttggcattgtcattaacctagaccgtgaactcaccttacatccacaatatactacgagtatccgaatccgaaccccccacttagtctacggtattggactacccacaggtacgtggttatattacgctcgtaccatacctgaccgaggtaccaaccgtgtggatacggagtacatggaatgttctcaaggttccaacttgcacttcaggtgttttccccctccttgtggcccaaccttgtacttctgtttgcgatctatctgatatacgggtggatacactgatctattttgatttccttgctctttttccttttccttgatatttcccatatctcggcctaacgggggcccctggtcggatcatcgccgtaatctgactatttctttgtctagctccacacccggttgcccactgcgccatcaccaccgcatttttgcgacctaggaaattcggagctttagacacgttatttgattcgcacgcttctaacggcgcgatctgatttcattgttacaactttcgctccttccgacatcagatccaccaatccgtcactcattcgtttccttttattacatcctacttcctcgactccaatcgatagcaccatgttggcttgagtcccgatttaccaagctcaatcgcttctcaacggtaaataccaagtgccaaggaccccaggctagttgcgacaagaccacaagacggccgcgtcttggtagcttcaaaacaccggcgcacatcacccggaccctccatttacaatgaatcgcatgcctcccccggaagggcaccacgcgcatgcgggttcgcatgtagcatacgacccctcatggcgccctgcataccccccgacattcgataaccacctctccgacccccgccgctccgcaaacccccagactaccctacccccgcagccagcaggataccctgtgatgcccaaccgtgagctaccacagttaacaccggaaggcccctacggtcgtccgaatggtcatggcctgcccctacatgcgcccgtgcattccccgcaagacccaattccccagaacttccaccagccaatgaatggcgcgccgcatgaggcctcacctgattatcgccctcgtatgggctacccgcccccagatcagatcagcagtgctgagcatacacccgtttcgggtgccctgcctcccgcctcccaattcatgacacccgttgcccaaatggcgagtgctacgccgcctgcggggtatgatcaggcattttatcaaaaccagacgtttggagcacgccagcgtaaggcgaatagagctacgcaggtatgttaagctagtagaacacagtatcgtttcgggggatcccagactaatactcgagctatataggcttgtgaccaatgccgagcgaggaaagcaaagtgtgatgagggacgaccaaattgcagtcactgtaaagagaacaatctgggctgtgtctacaaggaggtgccgccacataaacaagagaagaccacccagctggtattggatcgactttcccagatagagaaccgcatggaggagcgagacaaccgcatggatgagcgtttcaaaaaaatgcaaatgcaaatgcaagagcagttgctgaacaagctgggcaatcaaccacctccgactgtccaagaacgtccgtctcttccaccaccgccaccgctcatcaagcaggacccgcctttcaaaacagagatgcctcgtccccatgccccaactccaaatattctggatcccggcagtcaatattcacaatttggccaaaatctgggacccatggacccgagactcgaagatcagagggaggctgagggagagctctccatcccagtggagcacaccactgcagctcacaagctattgatgtggccgtcaattaagaggctgctacaccctgaacaatatgacgaggactatgtgatgcgtttggaagaagagcgcggtctcctgagcatatacggccaaggcgagatttcatacaccgccgatgacagtcaattaccaatggatggtgactccaagggctccaagggtgtccgacccgacggggatggcgcaggaccagatgctgatgtcgacatcgacgaatttgggaacatgaagctggatgctgcaactgctaggcgctactatgacagctacatcgagcacatgtttaagctccacccattcctcatgatgggtgagctcaatatcaaggtcgacaatttcatccgatgctattgtcgccctaatacttcaccgagttcggcttccagttacacacgactagcgcgcgatgggccgccaccagccaaaaggaggcggtcgaacgaaaacctaggtgtgcgtggcgagttcatgcagagcatccccaacccgccgcggccacgggtcggcaaaaatatcgacaatgccttggttatcctgtgcctggcccttggagctatttgcgaagctcctgcccctctccctgggcctatcatggacaagaagattgactaccccaaccagcgcattcctgaaccgctgccaccgtttattcctccgccgaccctaaatgggacatacgttactaatggtgtgctctcccccgcaaactccgactcggcggccatgcagatgtcgctttcgaattctctttatactgtgccaactcagcctcccgggcagtctttccctgacagtccactcaacaaaggcataccaggtctgtcaaggagagatgtgacaaatgtgcaggatgaacaagggaacacaaagaactaccaggctattcctggcctgactctctatggatatgcgaccgcaatattgggccatctacagggtggtaacgagctagagcatgtccagtgtgggttgctcgctggtctttatgccggccagctggcccaccccttccaaagtcacagctggatttatcaggcctcaagggcttgccaagttcttgtgagaacaaagcgatatgagcgactcgaagaggggcctacgcaggacctgtataacttcgcttactggacgtgtctgcaattggagagtgatctgctcgcggagctggatattccagcgagtggcatctcccgctccgagggtcggatggctattccgaaaggaaaatggactatcattctaccgaacgatctcaacgcaccccaaacgatgatgatgctgttttattctgctcaaatccatctacggaaagttttgaatcgagttcatacagacttatacaaggtcgaaaagcaaggccagacacgatggtcatccaccgttcaagaagctctgagcctaaacctcgacctctggcgtaaaagcctcccacaaagcatgcagtgggacgaaaacgatccaccagcaaacgaaattaacgccgctcgcatgcgtgccaagtattacggtgcccggtacatcattcaccgacctcttctctaccacgcattgcactacggccatacaggtgctcgcgtcggtccagtcggccactcatcagtgaactcgcctacctcgcaacgattgtctccctcaatgctgcacagtgctcgggctccgcacatggcacgtatgtctagtgacataggctctatgccggccgcagtctctgcggactggcaaccacctaaagtccgtttacaagatctgccgaggaaattgaaaggggcctgcgacatctgcattaaatcggccattaagagcacggaggcttttgacggtgtaggcggacatcggttggtcgttaccaacattttcggcactgcccatgcgtaaggaatcctctgaccccgtttcaaagaatcacagctatggagatgagactaacctattttatttgcaggcaatttggcaatatgcttgtcctatctgcaactttcatgtcaagtttaaacgagcttgtcgagccagagcaactcgatcgtctccttgtccgcacaataggattcctcattcaaagcgaaaatatatcccccaccctccgcgctgatgctcgcattctcactgaaatctacacgatgatcttccatcatcctcctgatttgagacgagtcaccagcatgagtagccacactcccagcatgagcagtcatacccccagcatgaacagccaaactaccagcatgagcttcccttaaatgtgcatccagcgtccaagttattttttttgtcctgttcctgtgggctttgcaacccgatacctgatatcctatatccttatgaacacatcatgcatgtctctgcctctgtcccttcaagcccgaatccttacacgctcaaatctgttatctgcctgtcttctataccttgtgcactatatagtccttttcattgatgattccccaaccttatccgattcaacactccacactcgtgcatctgagacaagatcagatgacacgggagttattggcggtgattgatcggtatggcttatttttatacgccgagaaatctcacccattctttcattgcctctcttcaagtgatgactggattggctttgactcgttcctttttttttttctcttctctctcttcctcttgtctcggatttcgaagcatttcgtggctccgacggtttgtccccgcagagatacgtggagttattgtcttgtgtggttattctatttacatcacatgcatcccaagccgtacacgtacgttggatgttcttggatgctcttacaatatgccaacttatttctgtgatttggctgcgccatatcgttttcatttccatattcaatgcgaaagtttgcatttcgtggttggcttttggtgttattgcattatagctcatctttagtgtgagctgtctttgggggattagttgctgtaaatttccttctcggtagtttcccagactggacaggacagatcaattgagatgaagtcctgatattgctcgatcaaaccctagtgggaatggtagctttggggttcgtgcacaagcttggaagtaccagaccctgcggttttgtgggcccttccgctcccacggtttcaactcccacggttttcatcagggccggccggtatcaaaccaaaattattcaaaagtctaactagaataatttggacgaataggcatgtatatgctattattatacctatcattcctgacaatcacagagaaagcaaatgcatgctgctcgcggacctcggcttctctgcattgtgctgatcaagagtgtgttagagaccgtatacatcaggcatccttcgttatctttcaggtcttgaaatggtaaaaatcgacatacatcccaacccagacatgacaagaaatgcaagaaatggacctcaagagaagagatcgacaccttattcctataccaaccagccaatgcttatataacctcaatcttcacagctgatgtgcacggcaaatttacctctcgaagttacttgccatcattgcttttgcccaatacgcagtccgaggctgttataatgttcgcgtcgaacatcgcagacgtagcctccaaagtccgcggctcctaatcaacaacacaggcatctataccaacaaccccagcctatacgtgccgcttgttcgaggtcaacccgctcgcgcactactggctctggcaggagtttctgtctgatacgatggaagcgaagtatggtatcgtttttactgtggctttgcttgctgggctcaccgttgcgcattatgtggtggattacttggcgtccaaggctgcggctatttcgttccacggggggcttgttgctgagctggttacatgataccatgcactttatgttcgcactgtccttgcgacccaaggcttcattaaaaccgttagtattgaagatttgacccttgaggatacttcgtttaatcccccgcttcaccctgcgaccattgccgcggagcttgttaagcaagcgcccaaggctgggtgtggacatgttgttgtgcctggatctgtttggtggattgcaaaatgatcaaagggctgtctggatggttacagcatttgctgggatgtaggttggagaagggtttccagtttgatggagctactggttggacttgggttggtctttgatactcgaatagtgagtggtgttgtggctatatggttgcgctattatctgtcatgttgatgcagatagttattgcactcttatgacaataatatttgcacacccatttaaactactttgggtatagcgcttcttggccaggctgatgcttttagttgttcgcaatggtacaggtagcatgtgacttgtttttatataggcattcgggagtgctctctgccgagaaggatagaatggatagatttagaccagataccattatcttcagatgtatcgtcgaggcacggagtattccgtactctatacttccatagatggctgggaagaagtgaccccagccagccacattctggtccgtgcacgatgcttcaccgcgattttgattcgctccacttgttgcaccgacagttcatcagcgctatgaacacatttttcacagttgcatttctcagcagatcgcctgtatctcatctaacccctaacacacagattctatccgatacccaacactagaacaagagaataaggtgaggttaagggccatcaagttgagatccactgggggccttttcggatacaagatccatgggtctgctccgttgtttactcccccaaacaaacccataacattgcgttccttctgacttacaacaaacacttccaccccacacctgcccccattccaatcattccaatcattccaatccttccaatcctttcattccacatggttcgctccggctatccacattaattgcctactatgttcaaagccctgatgggcgggggccgctcgtcgtcctcatccgacgttcgcagcagttctaagagcagccggcgcaagtccgacaggcctgacaattctgacacaagatcgatctcaagtcgcaagtccgcacggggtgacgaccgtgaccgcggcctgggtgatttgtcgtcttattcgtcttcggctccccgcagtaagcgtggcccacttagcaccgctggcgactctatctcaacctatgtgaccgccgagacagaacccgttgatgacgccgatcgcgactatattgaacgcacacccaaacgcagagacagtgaacgagaaagcaagagttctcgtcagcgcgaccaggaccgatctgaaaatccagagcgtgagaagagaggtagccgccgaggaacagaagatactctggacgatgacttggatcgggagcgcgacagtcgcgagcgtcgccgcactcagtcaggggacccgtatgtgcctccgatctccacaaacgtgtcggctagtgcccccggcgcgcagtttgccgccgagattggcgcaccgggattctcgcaattccccatgcaatacgacactgggatgccatccgcaggccattctccagcgcatgaagttccgtatgatccgcacgtgcagcaacaattccccggccaattccccgagcaagtttctgccccatatcggccgcctaaccctgctggcgctgcggcagactactatggtgaccaaggccagtctgttgagcaccagcccggtgttcggccggctcccccaagtgtgcttccgaacacgcaagctcacttgatggcagcatctccatcggctaatccacctccagagcctagtagcctgggcgaaactggtgcggcggcggcctattttgacgacaacttccatgctccggcacagcaagatcagccgccgatagtgcctccatttaaaccatcgaaaccgtctaagccttcgaacccttcatcgtcgggcgttcttcctgctgccgccgttggagctgccgcctatggcattagtggtatgatgtctcactctgagtcgcattcccctccgcagcacactacttcgtacgtccagcagggtcagccaacggtacatgaccaccagccaacggtacatgaccaccagccaatggtacatgaccaccagccaacggtacatgaccatcagccaatggtgcatagccagtcaatggaataccctccattcaagccgtcccattcgcatagcttcagtgaaggtgtcggcattgcggctgcaggtgctgcaacggggtacatgatagatcatcaccatcacccctctagccccgagcacgcacctcattacgcttctcagcattacgagcaatcttctcaggctggtggtatgccgccgtatgcccctggccctagtaatgctttgtatgctccaagcgcgggtggatacggtgctcatgctgcctacaacccgggttactatcctcacggacccagcgctctggctttccaagagcgtcagcgtggtgccatgggaagatttgttgatttctggcgtgaccctgaggccgttggaagatttgaggactacacggaaagtataggtgtgtgcaaatactgtttccaacctggtacgagctccatcgatgctcctcgcaagcaccattactacagaaaccgccgacactccgccgaccggcggagcagtgggagctccagagtaagcaaaaacagccgatacaactcctctgaagatgagggccgccgacggtcaaagtccaagcagtcttcctcgtggctgcctggcatgctagccggttatgcgaccaagtcgctcttctcgagcaaggagtttgacgattcttacagccttcgctccggccgagggccctcctcccacagggaagaagatgaccgaaggagccatacctctcgtggtgtgacccgtcgttctggccgcagtcctcacagagactatcgagcagactccaagcatgcatctcagtctggatattctcggcacacaagctcccgatctaggtcttcctcttctggccggcattcgtatctcaaggaggccgcacttggtgccgcagtgggtggggcctcgcttgctggtgcaaagtcgcgtaaccgctcccgcagtcgttctcctgaaagacgacaacgccgaaaggattcatcttcatcatcgtcctttgttaatattcccaggcccagcaagaagtccatcgctggtggaatcgggtctttcttcacttcttcttctgagaacaggaagaaacatcacaccaagaagcggagcggttttttctcgttcaagagtggctcttcatcctcttcattggacaatgatcttgccttcggacataggctgccaataaaatcttccaagcctaagaagaagggcaagaagggtccagatgttgatgccgctttgctggaacttagcgacacagcaacccgtttggctcgctcctcgccccatgctcctgggcgcactgcaggtcaaatgtacacagctcgaccccgacagtctaactacgcccactctaccacacaggatgaagaatgggtcgatgctgagtcagaggaccagttctcttcaagtgttagctctgcgctcgcattcggggaaagcagcaccgagtcttcctccgactccgccagtagcaaatggggctggagatggggaagcaagaagtacaagaagaagaaaaaggacaagcggttgagtgctacaaatgccgctctgatagctggcgctggagccgctgtgatttcttccgctcgccaccgtgatagtaaccccccaattaggcctggaagcctgcagcaagtttacccaatgcctacttccgacccatctcgctttgatgtggcatctgtatctgcaggagagccaactctcatcaggccagggcccattccccttcagcagcctcagcccttcaccccagtctcccaatcagtgtacactacccagggagctgttccggggtcgatccccgcgtacagcaccccagtggccccacccctcttcgccaatgaagttgaacactacgactcgcagtggcagttccaaggtcctcgtgatgcagcatgggcaccagcagaatcaacatacgccgaccgccgcagagatcatcgacgcagtgattcctctcctgttttccctacccaggaaactgcttccaccctcaagcgccggttcactgccaaggatcaagcgtctgtgcagtttaaattgacggaagagcaagcagagagggaacgccaccttactcgtcgcaatgagaactatcgaggtgaagttgctgatcaaccggttcaactgattgaccgagaggaggagctggcccaccaggaaactgagcgtcgagagcgacgccgaaaggagcgagatgaagagcgcctgtataccggcggcagagaaaatgactcctcatcatgggttgctgcagcggctgccggagctgttggcgctgccgctgccagcactattctttctcgcaagacaaatgatgacgaagcctctgaagccagccagcgatataatgagcgccgagaaaaacgccgcgctgagcggaagcgcgatactgatacagtagcggatgcgatcgtgtcgcggtttgagcccactcagcctattaacgaagaagtgaccacgggggaatactgcgaagaccagaagaaagggtctcctcaatcaccccgtccagcacaggtttatgatgattacgccgaattttatgcccccgaggagatacgacatagcccagatgatcatgctcgcagccgtagctccactaatatgcccaccattgtggagataaagcccgccagcgaacgaggtacacatgaggagctcgcccccacagagtcaaactattcatacgaaccctatcaacacgtggaccgcctcccatggcgagtccctgggctcaacttaattgagccaactcctccccaaagcgtgaacggtagtgctgttcgtgacgctacttctccaaccacccctgtgaataagtcttatgataccaagcctcacgaacgaccaaccggctcccgtgtctcctggggtgagcaccaaactcacgagtacgaagtcccttcttcttctgagcaggatcctcttgagcatgatatttcccctaccgaaatttccgccaaggatgttcctctcccggcatccaagatatcccaacccaaggatatttccggcccattgcaatatggggccgatattgaattcgcggccacaattgctgctgcgaccgccgcagctgggttcgacccctctttgatcacagacgacccatcctaccacacccgcacttccccccccgggtcggagaacgaacacacatttacctcaccctggtctgcaccggctcgcaagcagccccacggcttcgtcgagggcgaggtcgaagaaactgatcccaaatctactaagaatatcacttctacccctgagcatgtgatccaggacaaggatgagcttctcttcgacgagccagaatccctcttaggagatcaggatagttcgtcgggccgccgtgacaagtcctcaattgcgcaggaggtcattgagcagctgaatggtaaatatggcaagcgcgaccgtaccacttctcctgaaaaagatgtagatgtcctctcgatgcctggtggctttgatacagccaactctatagacttagccgacgccagatccgtggtctcagcgccggcgcctgttatcatggacccggagaccccgaccaagtccaagtctaagaagccaagggagaagggcgatgccgttgatctctccgagttccaagagcgggaattcgccgggtctcctattctgaaggacgagacaccgaagtcccgcagctcccggcgtcgcggcgacgattttgagatttatgaatcacaggggacgtctccatctcgggctgagacttattctgttgtctctgctcccgtatcgaagggtgaaacatccaagtctaagcccaggaaatccagaaggagtgataatgacttgggcattgctgaataccttgattccgtggctccggagtctcgtgatgattctgtctctgttatctctgctcctgtttcgaaggacgagaggttcaagtccaagtcccgcaaatctcgacggagcggggacgatttcgcgatctacgagtcacgcgaaccatctgaagctcgggatgatatccgctctgttaactctactcccatcggcaaagagtatgtgtcaaccaagtcagggaaaccaagacgcagtggtgatgattacgagctccctagatcgcaagagatctccgaatctcgtgacgacaaccggtctgtcttctctgcacctgtctcgaaagacgagaccagcaaatctcgccggtctcgacgtagtggcgatgatttcgacccacgtcgtgatgccgaagcggcttctgatgacgcggaaggtgacgaggaaaaaaagagacgtcgcaagcgtcgatccaaccgcgaaagtgacaccttgtctgtcgatgacgatgctcgcttgaccattacggacattggagacgacaagtctgagcgccgcaagcatccctaccgctcatcccgtgaaactaacattgatgacaatgcctctataccctcttctccagctcaggttgacgagtccctggagaagcgccgtggcaaggataagaaagaaaagagtgcaggctttttgcgaagtgtctttggctcacaagtctcggccccagctgagaatattcggcctgaccattctcgctcttcttctttagataagcgctcatcccgcgaagcgatatctgaagctggtgtggatgatgaacgccgtcgccgtaagaagcaccgcagctctagcaatgctgatgagctggatccttacatgtcggacaaggagaggagtactcaggacgacacaaatctgaaggagtacaggtctagtagacagcaaaaggaagagcggcgtcgtcatcgatacgaggaaatcgtggattcgggaaggaaacgggaatccgagaaggtatagcatctgaacttttctttttacctacttatgttgtgattcttgttgtacactttattttcccatatagcttcccttttttcactggttgatctaaccagcttgcacaaaaaccacaaaacccgaacaaaaaaagaaatgtactaagcttttattggttttattccatgtgcaggacggatatagtgccaacttcgacgaccaattctttctaaggaagcgcccggatattctagccgcggatcagcgtgaagattatggtgcttcgtggcttccagccccagcggttagcgcagctgttgtagctgcaggatcagaacggaatgagatcccgcagcagaggccccggagccaatccacctctcccccagccacggagaggacacttgacttgaccccgaagtctctgagccgccccgcttcacctggaacaggccgcccccaggagtccccattccccaagcaacgccgacactccgtggctaagtccaccactgaatcgccgacagccgtccctctccacttccgccgtcccccaacttccccaggcctctcgcgcgcagtccccgttgaacaaccctcccccaccgcctccccaggctccccaagccagcaacgcaaccgccggcctgcatcggtcgagtttcgaaactcgcgcgagatacgccctctatggctcgtcgagcgccacagtttgatcaagggtgagcctgagactgaggagcccttgccatcgctcccatctagcaagacctcctcccgagccccgtcagtagaggacctaaaatcccttcgcgaagatgacggccttaagagctgggagcatgtagatctgagccactcaatcatggagaatcagcggccgactggtctgatgatttcaaccgaccaaaccaacgagagtcatgatagagaccttgatctcctcggctcgcagcaggccacgcctactgctgaacacttccagcacgcggagcctaggaaggaaaggcccagatacgagttccactccccctctgagctcctgcgggaccccgctgttctggacgagttgcctccgtcacctacactggacatcctgccttcagtagagggctcccttgttggtgttgcctttagggagcaagaaacgcagcgtgcgcttgatgctcttgagggcgtatctcgccctcagcctgaggcggaaaccccggcccaagaacatgattcgtccttcagtagcgctgcagatttcgccaagggcgctggctctgccggtgttgtcgatgcagctgccgttgccgttgccgttgccagggagcatgacgagtctcgctccttgcctgcagatgaacccactaagacacatgacttcggcgatattgtcgatgcagcggttgccgctgacagttcctctgacgaccatggcaaggcccttatcagcgaggagacgctcattgagcccgtccctgccaccgaagagaatcactccgctgacaatgagtccgtgcaaccgggtatggaggcagccaaggaagtcgatcctgaatcgactgaacaccttcttcagtcttccaatcttcaaactcaaccagagactgaaatggcccccgataagaatgtggctactcaatctcctaagaagagaaacaagaagaagaagggcaagaagaatcaggcccaagatgcggatctggtagcctccgaggaaccggccgatcaagagaatttatccaagaagttggtgcaggaccctgctgaagtgcctgtgcctgaagctattactgctgagcctaagcttgctgtcactgagcaatccgagactgagtatgttgaggtaccccacgagcctaggcctgagcttcaggttgatgagcctgcagtcgaagctgctcctgttgagttagcccctgtccagactgctcctaacctcgagattgcgattcctaagcaatacgaggctgagcttgccgaggtatcccgcgaactcaagcccgcgcttgaggttgatgagcctgtggtcgaagctactcttgagtctgcggccgtcgagaaggattctgttaagtccgatgttgctattcctgagcaacctggggctgagcctatggttgaagctactcctcttgagtccgttgcggccgagagtgctcctgttaagcacgatgttactattcccgaggaagctgaggctgagcctatcaaggcctctcgagagcttgaaattgagcctttggtgacaacgcctgaagttggcacggctcctgaatccgaggctacccaggacaccgcatcatcgactaaaaaggctaagcgtgacaagaagaagcagaagaagaaatcaaaaagtgcgtctacttctgacgagcctgcaggtgatactgtccttgctcggccccaggatgttacctctgcctccaagcagagtgagggcgagcagcaagacatcggtcttgccgccgaagagattcaagcaccgcctttgcccgaggatattgctccttccactgagaacacctctgacccgactgtgatcaagtctgctaccactgatgaagagcaagttcgaagccagcaggaatccggagagctggttcagcctgtggaacatgtgcccagcgaggaatctgttctacctgtttccgaagatcccagtttgcccatcgagaaagagcagaccccggagcctgattttactgacgctaaagaaagctcaattgccggtgcccctcaaccagaagtggaggaaatatcccgcaacctggaagagattgataacccatctactccagaggccccagtcgatagcaccacgcctgaaatcccccaaacacccaaagaagacaccgaaggcgaagacaacttcgaagaggccgttgaagaacatactccacagctcgccgaggaaaaggagcctgcaacggaacctcgcatcgacgtggctgcacatgaccctgtagacgcatcagaaacaaaggcagagaagcggaaaaacaagaaaaaaaagaatcgcaaatccgctgctgtcgaagaaactcgcgagactgaatcccagctagaaatccaagagcttgaacctgagcaatcagctggtgccgatcctgcggatacccgatcccctccaattagcggtgaagccttaccttctgatcctgaacatcttgaacagcccttcgaaaccaccattgaggagcctgcagctgcccaagagcagaagcaagttccattggaggccactgtggatgtaacacctgttgcaaccgaggcagtgggccccttggagccacctgatgaactgtcacagccaattgccattgaggttcagcctagcgccgaaaacctggatcctgctgaggggggtcctgacgaaatctcacagccttctactgttgagactcaacccgaaaccgaagttcaagtcgagcccgaagtcgccttgactacggcccaaaagaagaagggcaaaaagaataagaagaagggcaagcagagtgaatccatcattcctgacgacgagaagcctgctgaatctacctcgccggtacctgagattgaggctgccactgaggatatagccaagaaagctcctcttgtcatagaaggcgcactgttggatgcgcctccccaggagagcgagatagagctgcccatcaagttcgaacaatcgcttggggccgagccacttcccgaggctgagctactttccgaggttatgccgccccaggaagaagcttcttttgacccccttccgcaaccagcgatacaggcgacagaggcagagatgcctaaagaagaacccatcgcacccgaggagcagcccaaagccgaagaatctcctgctgagccagaggctcctatgaccgctgcggagagaagaaaagccaaaaaggcgaaaaagaaacagcaaaaggagcaggaagagagcattggttccattgtgaagcccgttgatgctgttccttcgttcgatgccgaacccgctgatccaagcaaggatattgctccaactgcagaaattgatgacgctgttccagccgacttctctggaccggtttcttccgagcatgctcaggctgaacaggaggttgcgcctatacttacagaacccgaggcagctccactcaccgatgatattcttctgcccggcgataccgagactaacgaggcaatgagagacatcgagccccccgctgaggctaagccctcgatagaagacactgccccgtcgtttgagattgagcccgccgaagctcccgctaatgttccatttgtaccggaagaagccaccgctcccgtcgatatgcgccaagattatgaacagcaagacgatgttgtcaaggcagaggagctgaagagcgaggatgtgactctagcgcccaccgaagaggcctcggcaaattctccagagaccgatgcccccaagacacatgaaaagtctcctgaaatcgaggtcccaatgactgctgccgagaggaagaaggccaagaaaaacaagaagaagcagcaaaagcaagagtctgtgcagcttgaagagaagcctacgcctgagaataagcctacttctaccgaggagaagagtggcgaacaatttggcgacattttgcctgatcgtgaggccacaactactgctgaagccgttgcaggccttgatgagcctacagaacccgaggcagcccgtgaccttgaagctgagaccaagcctgaagaggaacaagctccggatgtgccaatcctcgattgcgaacttgctcccgagacacccgcagacaagattattcctataccggagattgctgaactagctattgatcttcgaaatgacgacaaagaaagcggcctagagcctatagttgaggtccccgctcccatggaagacccacagaaagagcaaaagcttgattcggccgtcggcgaggagcctgttttagacaagtctctcgaagacgagcccacagagtctccaccagagcctgttgtggaggagattcagtctacggaatccacagaaaatccagtggtggaggaggctgaaggtgaacagacggcatcttcttctaagtcgaagaagaagaataagaagaagcgccaatcagttgccgctgaggaagagcagcctgtacccgccgacgaagagtctagggctgcccctgccgaagaaaagaataacctcgcatccctggaagaggcgcctatacctatgctagccgagagtgaatccagcgagctcgcgctatctaaagagcttgaacagccttcacacgatagagacacggagcctgttattgtggtcgaagagccctctccagaagaaaccacgcagctagaggctgctacggatgtagccgccaccgaggccgctgcagaggccttaatgacccctgctcagaagcgcaaggctaagaaagataagaaaaagcggcaatcagttgccgctcaagagcagcagcctataccgaccgaggacgagtccaaggctgttcccactgaggaagaggttcaaattatacccaccgaagaggaacctacacctgcgcctactgagtgcaaatctaccgaacccatatcatctcaggagcctgggcagacttctcccaataaagatacagagtgtcccattttgacggaagaggcgcctaaggccgaagagccctcctcggaagtcacagcacaggcagagaccccttccaccggcattgagaccgctgaagagtcatcaatgcctcctgctcagcagctgaagggtaataaagacacgaaaaaccgacaatcagtaaccactcaagagcagcagcctataccgaccgaggacgaggttaacattatacctaccaaagaggaacctacacctgtgcctactgagtgtaaatctaccgaacctatatcatctcaggagcctgagcagacttctcaagatacagagtgtcctattgtgacggaagaggcgcataaggccgaagagccgtcctcggaagtcactgcgcaggaagaggtcccttccgatgcagccggccctgagaccgctgaagaggcatcaatgactcctgctcagaagcggaaggccaagaaagataagaaaaggcaccaactagttcttgccgaagaggaacagtccgtgcctgttgaggggtttaggtctgaaccagtcgagaaagaggtcacacctacgccagccgacgagaagcccccttctgaactggctcaggcagagctcactgaccctatgccgactcagggaaccgaacaacttgcggggacttctattatggcagaagaaacgcctgaggccgaagatccctctgttgaagaggtcgcgcagcaggatctccctacccatgcagccgccaccgaggcctctgaagaggcatcaatgactcctgctcaaaagaagaaggcgaagaaagataagaaaaagcgccgatccgttgtcgccgaagaggaacagcatatacctgctgaggtgcccaagcttgaatccgctcaggaagagcccactgtcgacaaagatgcgcaggctcttgttatgacagaagacgcgcctaaggacgaagaaccccccatcaaagacgtcacgcagcaggatacccctgctgagggaggtgctaccgagggcactgcggaggagacaatgacccccgcacagaaaaagaaggccaagaaagacaagaaaaaacaacgcaagtctgttgcttttgacgaggatgctactccgatcgaaggacccaagccaggtcaagatttatctacactcgaagacaaggttgaacctcaggatgctccggctgacttggttgtctctggagaatcagacaaggagttgccagtggccgaagaaaccaccaagtctgctgctaaaggggaaatttcagagatgatagaagaacccgcttcctctgaacaaagcaaagagatcaccgaccatgaactagtctcaactgctgcgcccgacaccccggtttctactgaaatcgagttgccagagcaggcggaacaatatgctcagcctccctcggagcccaagtcacctagtgcacaagagcccgaagttgccttgactacggcgcaaaagaagaaggcgaagaagaataagaagaagggcaagtctgtggacttagctgacaacgcccctgctgccacagacgcagcgcaggaatctgatcctaaatccgagcttattgttcaaacttccatcgatattccggctgcgaccccggatttgcaagataacccagcctctgagccagtacagctcgcagagggtctagagagtgaagataccattgacgccgaggctcccaaggccgaggaagtcgagccaacagaagccgtatcagacgctttgtcgaaagaggaaaccgctggcgtcaaggagaccgacaacgagcctccggggactgaagcaattgtcgatgctgaggcaactccctccgaagaactagaggccggtgcccattcttctgcggacctgaacgaagaagctggtatgtcagccaaggagcgacgcaaagctgccaagaaagcaaagaaacgccagtccaagaatgtcgacaccgataaagacgttgcaacatccgattcgccttttgccccgggaaccgagcctgctacacccattgaagcgaccaacagcgtcgaaaaagtcctcacttctacggacacagacgtccctggactttcagccatatcggcaccctcgcctgcgcaacatgacggtaaagaacatcagtcccacgacttaaaaacttacgacgccacggcgcaagatacggcctcgactgataaatacgtgtcttcgcaggtagagcagacgccgacagagagtccttttttagattatcctccccaacccgtgcttgagcgttcagttgattccggcgagttggtggagggaaatgatcagcagaagcgcgatgttgcccttgctgcacatgaacgggaggaggagatggttgagcctgcatctcttgaggaaatgaaggaagtgaatgatggtgagaatgttgaggagaaatcgtctatgccggaatcaggtgatatctcaatgaagaaagaaattgaagagacgtctgttgatgtgcccattgatgctgtccctgaggagacacaagagtctcgtgtgggggtggcttctaagacagctggctcgaagaagcagaaaaagaagaaaaacaagcaagaagagggaattgcagcttctgagcgcgagacctatattacagacgacagggagcagcttgaagctgcgcctttggttgagggcgagcatcagccggcaataaaggaaatcactgagcctgagcctattgccgaggccgaactagtgctattcccagagaagcaaccgggagatcactcacatgacatcgaagagattgtcgctggccagaaaaccgaggacgttgatgaaaccaaggatattagcattccacaagtcgagggcgttgctcctcccagtgaagcggccacgcagccagaggccgatgcagtcgccgagtccgctgaagaggcgccaatgactcctgctcagaagcgcaaggctaagaaggacaagaagaagcaacgccaatcaatccttgctcaagaatccgaacctgggccccaggctgaagaacagacagcatctgaggcggctggaacttctctccaagaggctgaggttgcaacggagtgggcacctgccgaagttatcacgcaagatgaggcttctactagcccagataagcctacagtgcagcctattgatgtccccgaggaggccaccaagaatcttgtaacgccttctcaacatactggaccgcatgttccaagccaagaaatcgaaggtggagatagctctttcgatctctcttccaccgagccgaaggtcgaggagggagacaagtcgcctgaggaagcttctggaaccccggcggacgagcaacctagcgcacaaacgccgcctgaacctgcccctgagcccgacggggaatcggcaactatcgctaagaataacagcaaaaaagagcagaagaaggccacggccgctgctactactgctgccatcaccgccacccctttcgagaaagaatacccacaatatcccgaggagccctcgacgatcacgcctgaagctctggagttggtggcagagcagcctatcgtccaagggcagcagccttcagagactgaggacaagcctcggtctgatgcagaaaagagcctagacgaaacaacagaattcacaacttttgagccgaaagaagatgttttgaagcagcctgttgatgctctcgattctgttaaatctctcgaatccgaggtaaggccggagcagtctacaaaagagccagcccaagaatcagccgccatcaatactattactaggaaaatgtcaaagaaggacaagaaaaatgccaagaagaaagccacacaagaagtaattgagccggctgtttctcctaccaaagatcatgttcctgccgccacgactgcaactgcagaagctgctcctgaaccagaggtgacttttgaggagacctcagcggaggttgttcctgccatcgagtctgcaactaccgaggctgatgttgaatcggaggcgacacttgaaaaaaacccaactttttctgagcatgagtccatttccccggaagaaacccaggtggctccgaatcacgagcctgaaaacaccgcaacgacggctcttagggactttagcatcgtatcagataacaagcaactttcagaaagcaagaaagatgaactcgtcttacccatccaacccactgacccagataccaacaatgagccccttcatctcgaggatcctgctgagaagaacgaccaagattatgaagcacacgttgggactgatgcagaccttgagaaaagagctgatctcgaagtcgtcgaggatcagcctggagaatacgaagtgatgtcgcctctgtccaagaaggtgtcaaagaaggataagcggaaggccaagaagatcgccggcatcaccgaagaagtttcgactcaacaacgggaagagcctcaggttgatgtggctgagttacccacggaatctgagatacagccgacagagcctgttgtggaaccggatacttccaaggaactggaacatgttgcagaacctcaccctgcattggagcaagggccgtcaactgaggctcccctactaattgaggatcagcctgtatccgggtctgaagttcaggttgagcctatgcaacccgatgaagaggccgtcgttagcgaggaacttcctctgtcacgtaaggccttgaagaaaaaggcaaagaaggcccaaaagtccaaaaagtccctggacactgagccaccggctaaaattccgattgaagcagatcaacatgccaccattgtgccgtttgaagataagaaccaggacacagaagcgcctggtgaaaagtcggctaatgacgaagactggccgtcgattgactggcaagcaaaatttgaagagtcccagcgatcaagggaagaggagcctgaacctgagccggacattcgaccttcagaggctgagattataggagaatatgttgatccttcattccccgaagtttcgcgagatgcaaacgaagctgcggaggaagataattgggctttgccggcgagcaaaaaagacgagctgcagtcacaccaagctgcttcggaagcccaggaggcttcactgggtccctttaacgacaaagagattgaacctcctattcgaacaactactccaggtggatctaagattgccaacttatttcccgacctcgagcgtgcgggattccgacgatcagctttggaccagcaaacaccgtcgctaaaagatagtgctgaggaagagacaagagcggacttggaagcgaatcgcgatatcgcgatccctgtctctgaagcacccctagcgaccactgaaaccaaaagaattggcgatgatttcgcctctgacctgcctagcagtctcgaaagacaaattgagtctacaatctcagagttgaaagctcaatccgaaagtcctgctgccacggaggatgaatcaatcagggggcctgaacttccgacgcatcgcgaaaattccttagatgcgtcattgccattgtcaatggaaccctccagtgaccggaatcgtaccgaggaaccttcttctcctacgcgccttccgcctggggcggaagccggagaggaactgtgtgagccacgccgatcaccatcaatccatggacggcaccagcatacacccaaaacatggagtttggaagaaccgtctctacaagctctccgtcccccttcccctcctcggtcgctcttcggaggaccgactgacgattatgtgcgaccccggactccgcttgatacaattgcggaacaagaaccacgggatggccagggagcgtccatggctcatcgcgggacgccccgcctggagatgaagcccgagcatgtcttacctcggcctcagacacccgtccggaagtttacagacaatgcctttgatcgagaggcttggcctacagaaaaccaaaagggcgggggttcaaaccccgatattccaaaaacgcctgagcaagggatatcaattctgaaacccagcaccagcagcggtaaattacgtcgtacaaatcgcagtgttagtggcgatctgcgggcggctagtcgagcgctagattcccagccttcgaatctcgatctcgatcaggtcccgtcttcctcctcttacgaccccgtcaccgacaagggcaaacgtcccctgcgaagtatgtcggatgtctatgtaagttattaatttatcccttattttcatttgcgattgcgattgagattgcagttgcgttgtcttgtcttgtcttggtttactaacttctccaggagggatggggtgagacgcccaactccccacggtcgcccagccgaccgcctagtgtccgtcgccgtcgcagcatgcaacatttgcaagacatcgaaacccgcctcgaccagctcatctctgaaaatcgtctactgatcgctgctcgcgatgaagctgaagataagcttcggaataccagcgtcgctcgtcgaaagagcgaccgtgcccttaacacccgcgacggcgatctgcgcgatcgggaatcggaggtggaacaattgaagaactcggtggaatggctgcagaaggagatgactcgtctgacccaagagaacgagggactgacggcatccaactctgcgctcgccgccgcccacgcagccgaggtcaacaccctacgcgagtcgtccatgcgcgaccttgccgacttacagttgcgacacactcaactctcgtcccagatggaggatcgagttcgacaagagatcgagtcggctcttgcacaaaaagatgttgaattgcgccgtctgcgcaccgaacttgaggtggcccgcgataaggtgaaggagctccaacaacaaatcgcagcctcggtacatgacaatgcccttgtcttccgggatgaagagtacttcgatgctgcctgccagaagctgtgtggccatgtccaatcttgggtcgtgcgcttctctaagcacaatgataagcgtcgctgccgcttacttagtgagttgcaggacgaaaagatcgcagaccgttttgacaacgccctcctcgacggcttcgatcccgatgcctacctatctgatcgtgtccgccgccgtgatgtctttatgtcggtggtcatgacgatggtttgggaatacatcttcacccgctaccttttcggcatggaccgggagcaacgtcaaaagctcaagtctcttgagaaacaattgggcgaggttggtccaactcgtgctgtgcatcgctggcgagctaccactctcacactgctatcccggcgaccggcctttgctgcgcaacgtgaaagtgacacggaggctgttactctggaaatcttccaaaccctatcgcaggtcctccctccgccgtctcatgttgaatcccagctcctggataacctccgcaagatcatgcgggtagcagtcaacctttccttggaaatgcgtacccagctggctgaattcattatgctaccgcctctgcagcctgaatatgatacaaatggcgatcttgcacgccaagtgtacttcaacgcagccctgatgaacgagcgcagcggtctgacgaacgacaacagcgagctcgaagcccaacagtccattgtgcgcatcgtgctcttccctctcgttgtcaaaaagggcaatgatgtaggcgagggtgatgacgaagtcgtcgtctgccctgcccaggtcctcattgcccgccctagcaaagacaagaaagtatcaaagatgatgagcggtgaccgcatgtccatcgatgcttccaagtcggtccacagcattgttcaaagtgttactcacagtgtggcaccgtcatctatgatggacatgagtaatgtgatctgaggcgtcacactccgatcatgattgctcccatcttaacatgcgtgcttgctgcatccttgctcttattgtctaatgatttttcttctcttctctcgtcaatgggtgatatggcgtccaggtcatctaacgtaacggtcattccaaggccaatgaccatgaatatgtggagtctttatgttcattttcattttcattttcctgttttctatttgattttctcatttgttctttcgaagacaatgtgccagcccgatgtgtattatcatggctttgatgtcttatgagtgatgacctgtacttctggtatggcagtgtaataatctatttcatactttattctttattctttccacttatctgtcttttacagtttatttcttggccctcggctagaattgtaagacttctctttttataagaatcaaattgggttgtccctcaagagcttctcgggtacagctccggatattacaccagctacctcttcaaggtaatctttttgaactcagcagtggtgtccctgatggctacttcaacaggaagtcgctccattgaactggccccatagaagccatgcaaaccctgcaccctgtctaatacgaatttcgcatcccctggagcagcaataggcccaccgtgacacagcacaatgatatctttattgatcctcaccgctgcatcccgcattgcctggatctccacaacacattgttccaacgtctttccagtcttcgccccaatcaggccagaagtagtcagacccatatgtgccaccaggatatccgccccggccttcgtcatagcctcggcatcctcgacgttgaaagcatatggcgtcgtcagaatatccaattcagctgcctgccgcaccatctccacctctttacaataccccatcccggtctcctccaagttggcccggaagttgccatcgactagtcccaccgtggggaagttctgcaccccggcaaatcccaattcccgcagttgcttcagaaaccgcgggatatccttgaatgggtccgtaccgcaaacacccgcaatcacgggaatattctgaacgatagagatgacttcggcggccatttcaaccactacctcgttggcgttgctgtacggcattagtcccgcgagacttccgcaccccgccatgcggaagcgaccgctattgtatatgatgactaggtctgcgcctccggcctcgaccgattttgcggaaagaccgatgccttatggtggattatcagtcaaactgatagacagaggcaaccgaaagggacaggtgacgtcaagtacataccggctccggctccaacaatgggtttcccgtcttcaatttgacggcgtagatgggcgaggatttcgctacgggaggtaggtggcgccatagtaagaaaatggaggtttggaggtttgtagtttgatcaattgttcatacagatcaaaatgggagggatcttcccaattatatgattcatcgtggggcggacttaatggagcgcggatgcggacgagatacacaaagcgcggagaccgcggacataagcgtagggatcactctctcattactgacagcaaatcattgagaaatggattctcaaacgccccagattaaggccaatgagtccgtcaatacattaaataatagaagatgaataagctatcatcctacaaccccatgcatataggagacgaggactaatttacttggactgccagtcaacatataagaagtccatcatatgatgtcatatattaattttatgcactttctatttcaatagataccaatcggcaaggatcaagatatacttcccatcgcattcataatcagatcccactgatcccaatccatgtccattggattaatccattgctgtggctcgatttgacgaaccagaccgggaaagccgacattctccaaggtgaatgcgtggccattactaaggtccgcgggctggctgatgggattcatctgtctatttgaattggggccctgtgagacagaattcggcaatccatccggtaccagggccgaggtagtcatccacttgctagatctagagagttgtccgtcagttctcattaagacgtatgtcacgcgcgctaggcaacttacagtatctggccgagaatcgttgctgtccgggtgcacagctgactttgcgcctttgacgcctcgagtcgagcatggcattcgtgaagcagtcgcacctcgttcaatgtacatggtttttggggctctatagaaagggcaagcaccaagacgaacgcggcgtggaaagcgtggaaagcgcctcggccacggatgtaccagtagaagggcatgaactggggcagtccgtggaagtctgcatgtagttctaagacgcgctgtgcacttttcaggcagcgatgctttgaccagctatgttgcggtagacaaacggtttcttcattcagtatattactgtggagaatgaggactaggtgatgggaaaaactgagcagcagatttgtatgaacaactgatgagctgtccccaagcatcgaggcgtaactctgctctagtgggtctaaatcggcttggatggccgcgtccaggcgttggagggttgtcggatcgtccggccgtgcagccagaacaggattacagatctcggaggatatctgaaaaaggcgcgattttcgaaccagatatgagacaggtttgatacctactgaggttgcaatgggtgctggttgtccctgtacgatgtcctcatcccacacctcagctgtgggcagaacacgcgacgagaacactgactggtatatatcaagtcctgtgatggccagattttggttacagagcagcatggtcaggcctagccaacagcggcgacgctcttcggtttcgacgatatccagggaaaacgtggccgggtcaacgtgacaaccgatcgacagcgccagatgatgaaccaaacccagaagagtccatgtttggccatgactatggtggatcccatatataaggttcagtagcgcctgtagtgttgagatgttgtgtcgccagagatagcgatctgcttcgaggcatttcatcgccgcggtgtaataccgctctgagagttccgtgactcgatcccaaggggtatgtttgcggctgagagtcttaagcagggaggctgtcattttccagtgcgagaacagccgtgcctaagatagtaaataggagagcaagccatgctagggagacctgatctggatccttggaaaattgatgataccgttcgtgaaacgtagggctatgtaagataggaaagagcttttctatgttaattttcagtcaacctgatgatagcggtagataggaaacctacgggcgcaatcgaatgaaaatatagatcctttaactggttgcaatactccgtcggtgggagttttgccaagagattaggtctgttttcagcatcgtgttcaccaaaaggatatggaccgctgggcgtgtcaatcatggcgctctcctggcttagaaatgggctctcttgagttgctcgactgaaaacacgccggccagaggtaaaggggaggaatcggacgtgtcctgaagtggatgggatgagagtgcccgttgtaaacgttgtcactggtcctaatctccgggtctcttgtacctctgaatccaattgaggaaaattgagcgaagatggtgttgtatctggctgttggttctttgcatgcaacagctgctctagcttttctatccgagctaccagatccgcatctggttctccggcgagaccttgataatgtggttggagagtggtctcaggggatgatgagcgattttccagtgggcgagcttgtggctgagactgctgcggctggcgctgtgagggttttctcctggtactatagacacattgctctagaggaacacggcgtcgtatacaagtgccgcaagcggggccatttcggggacatcggatcttgcgaacacggcacggctcacaagaaatcggaagacgctggcgtgggtggtgcgcggacatagtgatacgcactaatatatagccaaggatatgtaatatgctcgcggcttggctggacgaggtcgcagtcgaaggcggacatatacggagaaggcgggattgagttccactttgttttctccgcgctttgccaccaaatgatgctacaatgtgaggacctaaacacgcatctgtcagtgttaagttaaagcctagacatagtcaggtcattcaataaattccctataatcttccaccagctcattcaccatgccacgtatcatccttctggggacccttgacaccaagcgtgcagaaattctatatatctacaaccagctacagcatattgccacccgcttctcgacgcctctagagattaccttgattgactgtggccgtcaagccattaacgacgatgccatcaccataagtcacaccgacctgatatccaagtatgcatccggcgacagcaccgatctattgacccagccccggggacaagtgattgaactcctcatcagctgcgtcagtaagtgtgtcaccgaattactgcgaactacggaggttcacggaatcattggtgctgggggtagtggaggaaccagtctgatcaccgccgtaatgaggaacgctgcacctcttggccttcccaaacttgtcgtcagcacagtcgcgtccggggatacaggaccgatggtaggcgagtgcgatatcacattgatgtactcgatcgtggacatcgcgggcacaaatcggctcctccgtgaagtgctggggaatgcggctggcgccatttttggcatggcatccacatatcaacataggctggatgaacgccggacccgaagtctgcaggataaacagcgagaagagaagaaaactcgagtcggtattaccatgttcggggtgaccaccccgtgtgtggatcgtgtgagacgtcacttggaagagaactattctgtagaggtctacgtttttcatgcgactggccatgggggaaaggctatggaacgattggtggaggacggctgtctagacgccatcttggacatcacaacgacggagatctgcgacctcattgccggtgggactatgagctgcgaaaccagccgcctagagatgacactgaagcgcggaatacccaatatcatttccattggagccacggatatggtcaattttggtccagtcgacactgtgccacgccaataccgtgatcgcaagttgctagtccataatccgagtgtgaccctgatgcgaacctctgcagccgaatgtcgggaagtcggggatttccttctcgacaaactaaaccggtttgcccaggaccaaagtatggttgaggtgtggcttcctaggggaggagtgagtatcattgggacggtagggtcggaatttgccgatgccgacgctgatgccgcccttgctgacactctacgctccgggctaaagggcagcaaaatccgagtggtatcggatgagcgagatataaatgacgatggatttgcactagacattgcggatcggcttatggctctcgtggcgaagcattcttgcagtgtcatagcgagctagacaagtctgtcgttagttatcagacaagcagtgtatgcagtggctaggaatttgaatttatctatcgattgctagctcgacaccgacatgatccgtccaactttcacctgcgaaagcctaggctgctgtcaaagtcttgtataagacctgttgttcagctgattcaagactaggtgaagtatgaagaacctcaatttcaaccttgtgcttgttcctttgcctttgcctttgatctcattctatactaagttgtacggagtagttaactacaggcaattggattttatagttgtgctgacctcatccaccctgttttaggaaaagcctcctgggctgtcccatggaattcaaacagccagagtctcatctgcagccttggagggacctcggtatttctctttgtattggattctttcttttttcttgttgtacactttagaaaaaaactggactcgttcccacttcctatttaaatccgaattcaagactttcttgtccttgttttcttccaggaatgttccactctggctttgccacccgcgtcatcccccaaacctgagctgcagcgctgtcgaccatgccgatgtcgatttccccatgatcatccgcgctagtaagatcgtatggaaagctgggtatcggtatcctacatgctgcgagtcttagcactgtttgcgttggcctagctccattggttgatgggtgggctgctgaaaaattaacctccgcttcagtgcagttgctctgtaccggagatatccaacatcaatcgcaacccaattattggcgctgtcacaatggctccgcccatgatcccaacacctggcatagcggcctcccgaccgcctcgttcctcgcattcgtctagccgtccacagcacagcgattatccacccgacgctgataacaacgctagctatggcccaatgggcggcggtcgggctccagggactagtagtccggtacccgtctcggagaccacgccagccaacaatacccgcttcatcccccccgctgattatgctgctggcaaaccctccaagtcctccaagcgcaaaaagaaccgcaatcgcaaacgtcgcaatcgacaccagtcttttattccacctagccgggaggaatctcatgatattcctggggagacttcggatgctggaggtgttagagattcaatggaggccgaccggccaacctcgagggacaagtcgttcttcaaattgggacgcaatctgagtaacacaagcttggagagcgatgcgttgttagaccatcggtaaaatctcgtgatattgagcgatctcggagcttgagatagatactaatttttctttccgaacagggaccaacctttgatgcgacctcgtcgtgacagtcgcgttgcatcgtcattccggccgagctccctaacatccaatgtcttccgatcgaacgatgggcaatctcgcagcaccccgaggggaggacggggccaacaacatcacaatggtgatagtgacgaagaggatgccaatgatcggaccccattgatgcggccagtttccagtcacacgcccggcaataattggtatggaacggacaatcgcccgaatttgttctcctcacgtgctcgacagtactctactcggactatgtcctccggctgttcaccaaaggatgatcgcagcccactctattctcccactgtggagcgagactacgatgtcaacaacccgccgtccattcccgggtccccaaagctgggcccggagatgaattatgacgatgccgtggtaacaggagctgattgggacttctcgttagctcggacaatggagaatcaccgggagtctatgaacgccttgaacgacacgctgatcgacatagacgggaatggattgcactcacattctgcgccatcttcttcgcctgggtcgccgcttctctctcctcaccaagaattacggcggcgccggaccgtgacattaccagcacaggaagatgtatgcttccccaccgaaacgatatccgaattgggagacgagggagcgagacaaattcctgatgaagccggcgaacgtcgacggcgtagacaccggcgatggcccgatctctccgccctggaagaatggagccgtgaggaaaaagaggagcgcaatggagacaatcgagtcaaaaggatcagtgagcctatgctcatcgcaggccgattgcgccctcagtatacaggatggcgacgtgaagaggatgaggcgccttatcggttcacatatttcaacgaggaatttccgagcaccattcatgctcaaaccatctctgagctggtacagccaggtggtagcttccgcgatttgtttattccagatcctcccgaattggaagattcgtctgaagacgaggactcggaagaggaatcttttatggagcatgcagctctcaatcactcaaccaatcccgccaacaagccaatatatcacacagacaatcaaagtcaaggccaaggccatcaaacgagcgttaatccttgtatgacacctcagaccgttgttcccaacggaagaactgcaaatgaccctatgactggcaatgctcctccggtcagaggaccctcgcgtttatctgtcatcagcgaaggacacccagactcccaccgtgagctctcgcccgcaccttccaacaccccttttagcaaaacccccaatccgaaacctaaacgctacggtccacggccgactttctggctagatgtcctctccccgacagatgcagagatgcgtacgattgccaaagcttttgggattcacgcattgacgacagaggacattatgatgcaggaagctcgagagaaagtcgagttatttcgcagctactatttcgtcaactaccgtacttttgagcaggataccaacagcgaggactatctcgagccagtgaacatgtatgtggtggttttccgcgaaggcgtgatctccttccatttttcgcaaacacctcacccagccaatgttcggcggcgtatccgccaactgatggattacctgatcctcagctcagactggatttcatacgcactgattgatgacattaccgatgtcttcggtccgctgattcaagcgattgaaaatgaggtcgatgagatcgacgagatgatcatgaaaatgcactctgccagcaaggaggtgtcgtccaatgacagtgtgcttccttcattcgcaccaggagatatgctgcggcgagtgggagaatgccgcaagaaggtcatgggactgtaccgacttctcagcaacaaggccgatgtagtcaagggcttttccaagcgttgcaatgagcagtgggaggttgcccccaagtcggagattggcctgtacctcggtgacattcaggatcacatcatgacgatgactggtaacctaacgcactacgaaacgtaagtttcttacctatatttaaggctggtctatccaaacgttgaagtcgctgactgtgtcgtccagaatcctttcccgtgcacactccaattatttggcgcagatcaacatcctcatgaacgagcgtcaggaacatactgccgatgtcctgggtaagctgactgttcttggtacgattgtcctaccgatgaacatcatctgcggcatgtgggggatgaacgtgaaggtaccaggtcaggaaatcgatagccttacatggttctggtgcagtatgtatttccttttctttgccagatgatttgctaatacttcatagttaccgccggactatgcgtatttgcatttgtatctgtttggactgctaaaagagtctacaaaattgtatagacgtacaatgtgtccccatgttagtttctacatttcagtcgattggatcgataccctatattttggtttggttatttgcttgttgattttggggaccggggggggggggttgtttctttcttcttggtctcgggctcgggctcgggctctgagtaatcggcgtgttttttgttttgtgttgtggggggcggggggggggggttgtttctttcttcttggtctcgggctcgggctcgggctctgagtaatcggcgtgtcggttcttggatttgatatacgatgcatgtgttgctctttgctacatttgggaggttctcagatatacataggatgaacgtaactgtatattacttggaattgttccctcggacgactataggttatccctttttggtagcgtttaggattcattgtctttttggtaggaacaaagataataaggaacccctcgaagcgaccctatatatagacaagctgaataacaggcaactgttcgactccaaagaaacaaaaacagtttcatcttcactgttgtagtgaagattgtacacccaaaggcgaggctgtagcatgatcaagccattgtatttcccttacatgagtaattaattattccctgcacgctgcacgttttatttccattaattaccattaattaccatttattacaattcccggcgtcacccactggtcatcaacctcgagaatacaaaaccccagtgacttcatctcttggtttctgttcgattcatcctcgttccctatttcacctttcaatcctccctctcttctctgcttttcaatcacattcactctctttcccgagattcttctactggattctagactatccgtgtgcttccctgcagtgacccctcccttcttgacgtggaccacgatcattggcctttgccacaaacctgaccctctctgtcagccacttttcaccgaggttttggtcaccgacttctcttgcacatttggcagcccagccgccacgccagaacgcgtaaaaccagtcaagccaaaacgttgagccggatcggcgggtcacttttcgccctaaatccgccaaccagatcttgtcatcttcaattccttcgttctaggccttccttttacccttcccggcaacaaagcaaaacagcacaagtgatgtgtgtgctctttgcgctaccctgacccccggcccacttgctattctaaacaatatccatcacccctgcacctgctgcagcctttttttcgcttgtgcgtttctgtacagaacccaatttctggcaacagcatgtggtcatcggctattcgttctgctggaccctcacatgtgtaaagacccatattctgtgcaacatcttattcaaccctcgtgatatctcattcgcccttaccagcaacaactcaacctcttcgccgtcgagctttccctgcccgcgtgccgtgccttgctttttctgcttacccgagccctgtctctgcccaactgtctggctacctctcgggtctcctgacttgtctacgttgtgtcggcccattctgacgcgacaaggactatggctgcggagtccgagaggccgcctcaccctnnnnnnnnnnnnnnnnnnnnnnnnnnnnnnnnnnnnnnnnnnnnnnnnnnnnnnnnnnnnnnnnnnnnnnnnnnnnnnnnnnnnnnnnnnnnnnnnnnncggggggggcgggggggccgcctcaccttaacggcagctctggtctatccagaggcccgaaggatgcagagccggcgtcagaccctgtgcatcgatcggccagtgaaggtggcatgatggaacggtccatcgtcacatcccaggctcaacccatgtctcaggtgcccacgcttttttccaatcctacccctttcgctcccacgtctaccaccaactccgctgcttcctcccgcgaaccctccccggtccgacgctcctcacgtacctacaatccttcctcgcccagccgggtatcttcacactcgcgaaagaccagtcaagaccagtcaagtccgacccgacactctaacggtttaatatctggcccacctacaaactcatcaaccccgaatcttcaacgttcatcctcttctcctgtcagatcccttgttctctcggctcctaccgactcgccagccaatgttcctggtccggataagtccaatatgccatcatgggccgcgaaccgtcgcacagatctggattcgacccttccgaatacttcgcacaaacgatcttcattgccattggaggatttcacacccaagcaggaccgaaacacaacccggactgtggctagaggcgtcagtgggcaagggtcctcactagaaaccgtcgaggagatggcaagcaatccctctaccccatctagtgagacttctatcaagcctgtaatcgcggaggagtcacgattgcaccggatcgatgaagacccaactccacctgctccgcatcaaactttgggcagtggcagtgacagtggtgagaatcgaagttcggaaccgaaggaggaggctcgtccacaggcgtctggtgcggccaaaacacccaaaactctcatgtcacagcgatcaacaacatcactcagtgctggtgctcgcggaaagcctgccgacggctcagttcgcaacatgattgtggagacagagaccgttagttcgataccgcaggtctcaatgggagtgggaaatggtgagcgaggcagtgcctcgcgtgcagaccagggtacacttcgcatgaaaccttccaatgagacgattcgtccgcgcaaagaaaagaaaaagatccgtcgacccaatagcctccttacgactggccccgtaacaagcaaagcagacattttcgaggctcgagtagccaatgcagtggatgaggctgatgtttcggactccgacgagaccttcgtttacgactcaaacccgcctgatccgtatccttcgcgaccaccccggtatcactctcgaactcctagtgcgacctctatggcgagtcaagcggaccagttgggtagtcgtacccgagggttgcgagatgcttctcacggcgtgacaggcaaacgcagcatgaaatttaccaacgccaatccctacaacaacagcagcatagatggcgatggggtcgaagccgatatggcttcgcgctcttctagaacggatgggagtggaaccatcactccccggcatcacaatttgggtcgccttcatggacgcaacggcgtgcatccaaatcttttcgataacgacagtacgcactcgcacggtcaatctcaaaagtctccacgccatttcatcgggaatagctataggcattcgcgtcacagcaatacccggctgtctcccaactacagaactattagcggtgccaagaacagcagcgagtttcatgggtatgactacgaggcagagggtgcggatgacgaacgcacaccgttggtaggtacaccgcgtacactccatagtcggagtggtcgacggcccaacagtgcaagcctgcgacagatggagtacatggcgcaccgagaacgcggacttttcgctcgattcggctcctgcgctattatcttccttatgttgttgattgtcgctggaggagctacatcattcatcattgcggcaacccaaccccttctagatgtccaggtcattgcgattcaaaacgtgctggcttcggaacaggaaatcatgttagatttgaacgtgcaagctgtcaatccgaacttgttccctgtgaccattgacgacaccgatgtcaacatattcgcaaaaagtcgatatgttggaaccgacaagttttggcgtgagcatgatgatctggataatatcccacgcgtggagcaaagccgacgtcgctggcagctgtcacaagctgtgaagtgcctgggcaatatggactgtatcaagaaagccatgcctagcttctctggcccccacgtcaccggcggagttgacaagggcaccgatcccccaaccgatccagaaggcgatccgcgatctatgttgcttggccgcgtgttccacttcgattccccgctatctttcgaatcatctccttggaatcatttgacttccagttccaagggacagatacgtctaggccggccaggaaacaaaaccgaggctggaggtacagagcgctgggagcgaatcctccaacacccgtttgaattgactgtacgcggcatcatcaaataccagctcccactcagctcccgctacctctcggcatctatcagctccagcatcaaggtggtgcccgataccggtgacaacgatccggagcaaatacctccaaacaacggtacagtgcaaatttctgtaccacaaagaagtgcacaatccattcgccttccactcgatactcgttccaccgcatcggaggattcgagacgacctttcacggcataacaaatttagcgatagatcgatatcattgacttacgacagcctatttcgtgttaattattttttttttttttacttctttttattcttcatgtaacgcgacgaaaagcaaagagcctattgcctttggcggcccactctgtatacattatacagatacgcagtatggcctctatcttcccttcagacttcatcccgcagtataccccgtttgcaatttccgtctttttgtgctcgcaagccttggagaagttctatcatggatcaactctgtctaggtctcgtcttccctttccgtcttttctcttgtcttcgaaaaaaaaagctatctcggaaatggctctcttgtgttggtcacttccttcgttggaatggatgcatgcccttccatccattccttacatggcagccggccttacccgcttttactggaggttcttttccatgtctattcttcctggtgcgaagcatgctgtatctgtactatctgtctagtttctgactgatctcagaattggtcttgtgttatgtatctctttgtacagcgggactttgagaaagacatttttcgctattagctcagtcttcgaatatgagacgggttgggctttcttaatttcgtttcattttattacagggttccgcatctgtatttctttttgttcatgtcccttgtaaaaaaggatatgtatatcctttgattttggatacataactatattaattggttaaaagaacagatatgttaggtgtatatagttcaacttgtcttctgatttggcccatgacatccatggattcatttgcacacgccgtgcaagatccagttctacttcgaattcgctcgtagtttatgctgctcccctatggttttacttaaaaggatccgtaccaaaaagacttttcaaagtatgacctatattatcttatgaaaaaaaagcaataaggaatactctatctgaacacatacacatcataaatcattatcatcggcggcaggcatcattcataactttgtgaccaacaagattgagcatgaaacatcaaggataaaaaacaccaaggataaagaagataaagagccaaagagatgtggttaatgttaaaaaataaacttgaccaaggcaaaacaatccacctaaagcagaagaactagacataaggtcaaaggaatagacggggacaaagtgggataaatggaacaccacacagcgacccgctagaacagaaccttggtaaacctattcaccaggtcctcaaatttatccacagcgggatcccgctcgggaagagggcggccttgcccatcaaagcggctgggtaggtcgatggttgagtcggagtctgcttcaggggctttgttctggtctctttcctcgtggtgtttcggggctgatgggtgatgtcgatggtgactagaatcaggatagaaattgtgacggtctgaggcagtagaagaaggagggggcataggtggatagggcacggatgaggagcggcgatgatgatgatgacggctatcacggtcacggtcacgatctcgatctcgatctcgatcgtgacggtggtctctacctccgcgatgcgaagacgaacccgatccaacggtagagtcactgtcatcggtctcgtagccaggatcgtgcggaggatccgtcaagtcgaacgcgacagatttcggcggttggctaattgaccggggggcagacgttgggaatgggtggatgttcagacctatcgattaaggatcagctttgattacattctatacagtcacagttgtggtccgccgaacccacccttgtgtgcgtggtttgcatcaataggtaggggtctcacattgtcttcagccctacgcggccgatgtgtgtactgctcgggtcccggtcctggtggcgcagcgccgtaggcataaggctgaggtggcgcagcaccgggtggtggagggtagtctgctggattgtatgaagcgggggtgctgttcaggttgtaggttgagtcgcccgggggcggggggtagtagttggggttggggttggggttggggttggggttgctggggtagtagtgggggtcaggcatgggcggggcacttggggccgcctgcggggaaagcgggtatggttctggattgtaggattcttcataaggatcacggtgcacgttgtcgtcatgcgctgattacaccactagtcagggtaaatatttctcggtaggaatttgatgaagtggggacttactggagtgttcgcgatcgcgctctctggacttgcgacgctcgttgtacttgtgggcggcataaccgagacctgttgcgcctagtgcggcccccgcgaggtctcgtgagcggctgcgatgccgtcggcggtgaccttcgccgtcagaactggatgaactgctgtagcggactcggctacgactgcgactgcgactgcggggatggcgtctggggccataggcttcctgttcatcgtagtagggcgcatcaggctgaccgtagtaatgctcagatgggatgctacctgcgactgggtcgttgccgtattcgatcaggccggccgagtcgcgagttggatcgggataggactgtgacggggcgcggctgtgagaccttgagcgatggcggccccggctcgagccctccttttcatctttgtcactcttctgcttctcgtagagaccggtggcagcagcagtggcaagaccggcagccacaatgggaagagcttgtctcaggcgggatcgggagcgctcaccctttcgagagcgcgactggctgcggaccttttcaaccaggccagccacggccgcaccagccaatccagcctcagccatgtgcttgcggcgctcagacatgctgcgtttgccttgttccccatccttctccgagcgaccacggctagaaacccgagaacgggagcgagtgcgagaccggcttttgcgctcatcagcttttgacttgctacgcagtgcagccacaccagcagccacggctgcggcaccaactcccagctcgagcaaagtctttgcacgagagtgcgattgagagcggctgcggctgcggctgtggcgactccggccatgtctgctgtgacgatgggaagaacggtcatcttcaaaggaatgagaacggtgacggctcttactacggtagtagtcacgagcatgcgatgcagcactcacagcgactgcaccaagagccccggcaccaatagtcctaccaatacggctggcgccatggctgacttcgccatcttttttgttgtggtttcggagcaattcagccgcgccaacacctaccaatgcaccctctgcgagatggcgacggtggtgagggtggtcgtcataatcgcgggtttcctttcggatgtagaccatactgtcatcgctgctgtagtcctgatcacgatcgccgcggtggcggcgactactctgggaaacggaatcatcagggctcagctcacgccgggagcgagcttcgtcgtactcgcggactcgacggtgacggttgtaataatacgggtcctcgtccacctcagagcggcgcacgacatcatactcggattcacggggactagtataaatgcgggcttcacgaataagtacgggttgttttggggtggacatggtagtagcagtaggggacagctccactcggtccagggaaatccatggattggaagtgtggtcgattggtgtggggatgtagggtactcacaatcatagtctctctcatagcgtgtgggtggctcatactccacctctcgctcgtagcgcgagacggtcacaggctcttcacgatccgttttgcgccggatcaccacctcgcgctcgccgccaaaggagtcatcgtgtctcgacatgaagtctcgacggtcgtcttcgggagaaatgacgtaacgcttgattgacacaggacgggtttcatcccagtctcgttcgcgttctctgtaagtgtacgacatggacgtaataagggtagtgagaaatgggaaataattgagaaatgagtcgagaagtaaaagatgaacggcaaaagaaaataagatgtactgcagggaatggaggggcggcagagaagtgggggtgtgcagagaggatgtgatcgactaatggccgaagatgactccagtaggtacagtcctctcgggctaattctgattggtaacggttatcttggccaaataaatcaaagccaataaaagccggtaaaagcccagtgggtttgaataatgattcagaatgatgagagccgtccacaggttctgtagggcagagagcggagtatgtattggcacgcactcaaccggcttagtctcagactagatgatcggcaggcagcactatgtatgttggcctcggataactcggaatggggatttgaaaggcagatgataaattagtgaacaatgaggctgcgagatgaaaatgtgaaagagaggatggaggggagaaataaaaatggaaagaggtcaagaggataaaaagaccagacacgtgaggctctttctctcgggtttggcaatctttgcccgggtacggtggcgaaacacgcgaaacactcaaagaccgtggctttattttgtttacaacagactcacttggattgtttggttcttcccgctgcttaacccacgggattctctcggctggctcgggatgattccgtggtccccaattttatattgatcctacttcggtagatgcagcctcacctaaatgtcatctgctgcattgacgggtacatctaagaatggatcggcgctatatgcacacagtcatgagagcagtttcctgtaacgtttcagtagggcacgactggattagctacaatccacacattgtattatagattaatcttgatctcgggttagcattttaggttgccgttttaaaatgattattggggtcttagcaaagaagattcgttctactaggcgccctggaggtgacatcatatggggagcacaaagactatccccaataagagggcaacaagaggcgtataatcctgagcgccctggtcttgatttccgtatgggagccccgcggatgacgtcaatgtcatgcggggcgttcttggcaactaattgtttatgtacccaagtacggagtaggtaactacaacttatgttgtagtgaaggctgagtccatcatgtacttcgcccctggggtttgaacaataatggtataaaagaaagaaaaaaattaagtgggtctctctatgttatatgcagaggccaaaaaaaaaggaacagagacaagttacattgcgtttcctcctgttgaaccaataacagatagaatcatcgttggcagatattgagtcccgaggcagcgattgtaagacttatgtttcaagaccacgagtcacagatgacgacagcatcgctcaaaacgatgactggtaaagcctagactcgtactgcatatgctgtgttggcgaccagcgctaaagtcaggattcgtcacaacattgtttccttgctatttttacaaggccgtgtatcggcctttgtccaccgagaattttaacaattaaccttttgctcatcatggtatgagtggcgttagatataacaccccggtgtcttttaggttttgtcgaggttacaaccttccaaaaaattagcacggagtaggttcatatttacgatagtaaaggcggtaaaaagtataggccgtacagagggcttagttgtatctcagtgccagtacccatcgaccacccgatatgactagtaatacggtgatcaccgtgaccaaggaggaaatccactttcaaacgataggaaagtagcatccggggtttttaatacaacatacaatttaaattcgttggggatcaaatcatctggcaccctttgctcgcatctccaatccacctgacatgtacctgacagtgcgtttcttcaaccccgctatattttttagtccaggttacaattttagtttatgggaagtcattcaaattttcccttatcatttcatgagagaccccagcctagtgttagctagaaaccatctacgtgcgacagtgcgcaccataatgcacacagcagaaataattgttgaatttcgtgtcgaacagaattggctgtcaatgctagtgtcgatgtcatggattaccaatgcaaatatccttgtggggccgttgataagcctttatacataatgaacataggaacaccgtactatgctagatctccgtctttctaaaggccttaggtacaggcaatctgacaggggtatcggttcgtgctgtgtcctgaatgagatgctcgaacgaaggcgaggatccaacacgaggcgtgaaaggctcaaagtcccagaggtagcctagagtacgcaggatcgaagaagcagagtaagatacgacctcgccatccgagttaacgcccttctgttcgacctgacccttagaaacccacggcgagatcaagagcgtcgggacgcggccaccgagacggtcgaaggagaacgtatactcctcgccggagggtgctatctcagtgtacgtcaggtcatccgggcgggtagccagcgggggtgggacgtggtcgtggaaccctcctgtctcatcaaaggtgaggatgaatagtgtctcttcccactgcgggctggagcggaccgcgtcgtagacattcttgatgagggcttcgccttcagagacgagaccggttgggtgcatggagtttgtgcccacgccgcagcaggacgggtcaacgaaagagaattccgggagcgtgccggctgccgcatcggcataaaagttatccagggggactgctttgtcggagttcccactcgtgaaggtccagtcgaagaagtaggcatcgaccatactagggcttgtgtagtagttcttccaggtatggttggtttctgaaagctgctggaagatcgaacgttgggtgaggccgtggacgcctgggttgaaggcctcatcgttggtaccgtgaccagcggatgtgcctgagagtacaaaggcccggttagggttggtgggctatttatatatgttagctatgcgcgacaattagagagtaggaaatttgctcggacttacaccggggtgatccgaatgccagtggttgaaggtgaggtagttctgcaccagcgtggtcattaccggcacctcgtcctcgatatagtagttgatgacttgcttggccaggtacgccttgtcagcatcgtcgccatagctgcgtaactgctcatgcacaaagccatgctgggtaggagtgagcattccctgagcaatgtggtcattgcttgggatgaaagtgccataaaactcaatattgttcccagtcaccgagtgatcaggatcatccagaacagagtcaaagtccttggcagagctgcacacctcgccagctgaagtatcggtcaagttgtacgggttgcagaaagggccgttgttgatagggttctccagtcccttgagagtctggccgccgagtaggttgtccacagagcggttttccatttccaggatgacaacattcttgatcctgcttttcagattggtgatggaagatgaagaataagagggttgctgagcctttgcatcagcggagatcgccgctgcaaaggtcaacaatccaaaaagggcactcgatttcatcatgaatcaaggagacaggtcggttcaaagtctgggccgagtgcttgatttcgggagatctgaatcaagggatctgatgtctctcttatatgttgcattcagccaaacatccctagcattcctcggaacaatccaatctcccgttccacgtgttgctccggaacttacggctcgattgagttctgtctagagatatgggtatggggagtggtagtaatcaggctgcggggtcatatgaatcaacaatctcacagggcggggggtgaatgccaatatgaaatgcacctgattggtgctcttcgcatcgtccccataactcatatgtgattggtcacttaggattgattggcaagtacctcaatcacgtaaaagacgtaccaacatcatataattgttttacttcacgccattgaggccggtgatttaccagtactaagttaccaccacgccaagtattcgcacagactgcgaaagtgccaacgcatgaacaaatgaccctcgaaaacgaggtcacgagttgtttggctaggtatgttcgttgcaagcaatttcatcaatgagacaacatgggctttcccacgctagcatgactaaaagagcgactttgacaaggctcggcatacagagtcgattattgcaaaaggtaacatttgatgcttctggctgatctacttggaactgctaccgctttctggatttgtaataccgctcgttctctctcatttttaattggtgagtatttgaccggcagaatttggggtgctaactactccgtagttattgaccaatagtaaataagtcccatggcggctgtagtctcacgcgctagtaattggctgttaaccttaggtgatgagttggattggctattttgtagagtccgatatttacgagtcagtccatcctacatatagtgagtacatttccagggttttgtcctggaattctggtcttttgctcctaacgcagcgggttgaccaggtagcacgtgacacaatgtagcattcggagaatatccaaataatacaacatacatgtacaagcttgtatagatgcgggggtgaagtcttcgatcaagaataactcatctctatctgtaaagtatagatgtcaaactaactcacccttattgtatatgtacctgtctaggcatatggagatatctttttatatctaactttattataggcacttgatcatcagctatgtcttcgcaagggagaatgctgcatgaagcagggacaatatgcttccgaaagaggaaggtcggtatatatcacgtgttgataccttatattggcacgcaatgtttgttaagtatcaccacgcgatggaccagattaattgtatctatagactataccctttttaatatatgtttgatttttgaacccggggtacctgaggactcatccaacgtgactgtttagaagattccaattttcttcttacatcgataatcggggtaactgtcgatgatgccatctacaaatgtctccgccccgccatgaaaaacaattaataatcatatctggatttccaatctaaccgcccctcgtgcttcgtcgcttatatatatatacatcgcttattttttttttcaaaaaagccccttttgtttctaacttgtcacatagcagtatcctcgtactgtgaaatacattccctctcatccgcaccgggttcaacatcccactactcccatcgcgaggaaagcaaaacccaacaacctcgacatcacacaaaccctttgatataaaaccatcgacacacaaaacattataaaatgacgacagcagcattcagatacatcgaccgagcttcctacgaccctgatgccacagagccattcaaaaagccatggggcaaagtcgacggaccaggtcggtcctaccaactcacagaactggaacgaaaagtcgaggacctccgaggccaagaatcgaacttcacaacagacaattccggtttcgccttatacaagtcacccgcaaaggagaccgcattcaccgacgatgctgaagtgcgagcgggttactacccagaagtagaagacctgctgcgcaagaaactgcccggggtgaaaaaagtagcgatcttcgaccataccatccggcgccgggtgccgggctcggcgcgtagtcctgtgcagctggtgcacgtggaccaaacgcccaaagctgccgaggcgagagtacgtcgccacctgccagaggatgaagtagaggagctgttgaagggtcgataccagattatcaatgtctggcgtccgattgaaaatccagcttctgatttcccgttggcgctgatcgattggagaagcattgctccttctgattttgtcaaagttgatcttctttatccgaaggagtggcaggagcatggagaggtagcgcctgattctgagtcatttttctctacggatgggtatgaggtcaagggagagacttatgctatcgctcctaatcaggaacatcgtttcttttacgccaaagatatgacacccgaggaagtcatgttcatcaagtgtttcgattcgagaagccacactatgactgggggcaagacggatattgctcatgggtccggacatactgcatttattgacccgcagactcctgctggatcgcccgggaggcagagcattgaagttcgatgtctagttttctacgaataagccttggggttctcatgtcacaatgggtgatgcagtcaattcaaaaaaatataatgtctcttatgtagtttctaccctgtatatcatatcatcctcattatcgtgatttatgttccgaagttgtcaatgagtggggctcggccgacagtcactcagctcccaatggcactagaatgcgcctttgataagtagtaacattagaaatatacgtaaaaactccgttaaacagttaaaagatacgcagattacgaactaaccctgtcttggcaagattatgtgtacgacttcatgtgagtcacagaacatcccctctctatcgttttttgactcttcacatccactagaaattttcgacatatgtagctcgcatctatcgaagtgatctgccaatttatcaatttacaccaagtccgcccacggagctgcctagatagtgagccctaacactgatggcctcttctaccctacaacacactaacatctaccgcaggattcaaaatgtcctcttcaacatcagaactacgagaccaaccagaatgctggacaaagggagaatacgtagtctcaaccgacgtatcccgaatccctatcaaaactctaaacacctggtacgctggcgaagagttctactgggcaaagccaatgccggagtccgctttgcgcgaaacattgcagaactccctctgcttcgggctgtaccatgatccagaccaaaccttaagccagtcagtcaagacaccagagaacgacgcattggcagactccacaatcgaattcgtcggctttgcccgctgcgtaacagactacacaacatttctctttttgacggatgtctttgtacttacctcgctccagggccgaggcctgggaacttggcttgtaagctgtgtgcaggaggttatcgagacaatgccctatcttcggagatcgctgctgcttactagagattggaaacggtcggtgccgttttatgagaaggttatggatatggagcttatggtatgcaaccctcctgttgatgggaaggatgcggtgggatttgctattatgcagcggaagtcttggggggctcctggggttggagagaagccctaggtatctcagcggggttgagaatgggttgctttgaaattattacattataaatagaattattgtggttagagatatagctgattgaaactcttttctttccatcacttcattgctcatatgcctcatgacctaaatattaattccatccagtatgccgccaaaatccaactcctaggcccaaaccatgaaattcaaatagtcatcatctcatcacatatttaatcaaacccatgccctccagtaccagaccctaacgtatcccatggaacagaagtaggaccgatccaattttgaggatgcatctgaccgaaaccggaatgcatggtgtgatcactggagatcgatgcaatagttggcaccggcgatccggattgcgagtgtggatgcgagatgttatagctgtcctgcattgtcattccctgggggaggtttgacattgagaggggcatttggatgcttggtaggaggtgagcgtgggactgggattgaatattggcttggttttgttggagttggacttgggcttggacttgagcctgggcctgggcctgggcctgggcttggaggtgggattgagagtgggtaggtgattgcgggttgtatttcgttgaggcaacatcgctagtttgtatgttagtcactagtccaggggagaatctaggtaagggcggggtgtaacttggacatacatcatctgtcgaattatgggaacagccttgctgcagaagacgctgcggactgagagcgaggcgaacatatctaaggcccgatcgagtatatctttgatctcttcgtactcggactggccctcggggatgagcaggatgacagccaatgtgactgcagcgtggaacgcgtggaaactgcctagtccgctggtataccatttgtagggcttgaacgattgtgtttcgaggagagtttcaaaaatggaaagtgaagccttggcggaagcgatgcacttagctcttgtagagcaagtttcagatgtaatctcgccttgtaggtaacggcagagacttgggcggaggaggagaaggagaagctgatggatctggctgtatatgatgtggtggttggcttggtggtgaatgggtagaggattgttcgtatcgagcgtatagcgaacctcgaccatttcacggacggatataatttccgcttcgagttgagaggttgtgaagcgggatgtatttgggtagctgaatattgtttcacaaatcttcgaggagattttatataatcggaaattcaacaggaggtaggtcacctgtgttgggcgggggaatgttgaaggtgctggtctttttaggtttgggctggtgagcagatcaacgtcgtcgatgtctgcgggcagttttacgtcttgcgttagagcctgctggtcgaggctcccaaatgctgtgttttggatggtatagagcatcattagtccggcccagacccgtcgtcgctcttctcgctcgattggcccgagggtaaaacgatctgggtctaaatggcaacccattgatattgcaacatgatgtgtgaatcctagcattgtccagatcggtagaccgcggtgaattcgggcgtaatttataagaactaaagcttgtaatgagttgatcgaatgtcgggacatcacaccatcggcggcgaggcaccgcaacgcagcagatcgatatcgtgctgacagcactttgatatttcggctgaccgttcgctctcgccctagatctgacagtagaggatggtcatcatcgagcgcgcttatggcgatagcaagaatggcgaatagcaaagccagccatgatgtagacacactgccaggatcatgacagaaatgctgatactcggcttcgaacgtcagatcgtgaagaatatggaaaacctaatgtgttatcagctagcgttcccccatttctttcatatgacataccgaggaaaagacctgaaaataaacatccttgagggtatcacaataccggccaggtggcagaatcgacaatagctcagcacgggatatacttccattcctcgccaacgggatctgcaaatcatcgtcatcctccgcgagatccgaatctaaattcggtaaacactccgcggcggggctattcgccactagagactcccactgcgaagctagtggcacatagcggacatgaccagaaggcgaagtacgaagtgtgccaacattatccaacatggggccgagcgagtcccatgtctcaggctccgagaaactacccgctgcactcgtcccacccagtggcgagactgcgccaccagtgggcgtgccagcatgcgaggtcatctgcttctggagcaaggcttctagattccgaattcgtgctagcagttcgttctgcacagtgctgtcaccgggcgaggactgctcagttgagagccgcggctggccgaggtagatgcagtcttcagcgcctagaccgcgccgcacgcatgtttggcatggccggccgtcgcgcgagcatctgatctttcgtattcggcaggcctgacagctgatggggaggcgcttgcctgtcaaacgggatgaggccatagattgggaagtgaggtcaaggatgcgctggactgaagcaagcgcaatcacctcgtcgtctgaggggattggagagagtgtgagattatagagcgaagaggagctgcctctcaggaaaatcgaacggccggtttcaaaaaggggtacttcgcaatatatgttgtgggtatggatcgattggttgtcgtctgttcatgggtccataagaaaatagggaatgagaacccacaatggatgagcgggggatattgatgttgtcagagttgagataaacagcggattatcgcagtcttctatacttcagcccgatccaatttgtaataggaggcaaccttttttggggaagccacatggggatgcgtgtgaatattagcggcatacttatttgcccctgtcttggagatgtcggccgagcagaaaataataaatataattattaccaaaaaggtctagggttcgacagccctggaggtgacaacattccttttacggggagaccgatgtatgaaacccttctataagggtgggaagggtccacgatcagagagttcagcggatatgtacctccgatgctactaacaaaatacagtatagaccgtaacagaccaccgggaccgcttagtcctaatagggctttgatacacctataaaccatggtttcgggccgacacccatgtcggccctttgaggaacacattgcttagcaccgaagaaagtacgaagatactacgatggaagtgaagtgtgtatgttgtatgtgtacgataccatcatacgtggatcatagggataactcgttcagaccgagatgtgccgttgccactaaacggggctaagccactcagcctgccgatcatttccccttgcactcggcttttcgtaaagatcggcgcgaatatggccacgaggggttagtgtggctttcctcagccacatgcgccatgacgacaatccctgtctagcggtagtgcgccatacttagaacaaccctggagggactccataaacgtgaaaattctgaacttttcagctcggagatatcaatgtcagttctagtggttcgtgtgagcgttgaattgtttatttttccttaatttctataggacccacggagagactggcttcgttgtgattttaccaagaatcactccattttgctgttgcttagaatattcgcctgatataagatcatttaatggaacgcactagaatattgttatagtaaagagcccttcctgcggctctccaattccatattcccattgtgcgaaggatcgtctgtgggctcggaccctccctcgtgttcctgtctctcgggaatccgataactttaacgttcaactactttatacatagtcactttgcagtaaaaactgccggcttccaggttgactccggggcaatccggtgaactagctagaaaagaaagagccaaaaaaaaacactacatggacacttcaaaataaagaatggaagtcaaaccaaaagtacgtggcaaacagtcccggatatcgggaagcatctagaagagccaactgttgcaaataatcacccgtagttccggctattcctccggattgtgggttatgcagctttgatcatcggtagagatcatcccgacgcgtggcgatagagtttctgaggcaataatatgctgtttaggcaggattcgacaactatgtcgtaggaatgtcaatattatattaccggctagaccgacaatgacagcatgtaattctgcatactcatcatcggtcgaacggcgaatggtaaacggcgaattactttgtaagtctgatctgttttagttccccatgcgtctggtggggaacccaaggctgaaacgggggcaagacacgagctgcgttccacaagttcttgctttgctttttaatttaaatacttcagcccaacaattgtttctgggtaaattacaaaagccacaaatttaatatccagtcagaagaaaggggttggaattctgctacttgcaacaaagtgaagaatatttgaataaatgtgcacttctgggattacggttgagatggcatttgtataagcgcctggataatctccccgaagccctgctaaggcagggagttcagactgcctttgctgtttcatgcgtcgatacatggctagattcaatgtgctgtgtctcgccaaccacactaagtgcacgcttaggtccctcgtcctgagccacaacccggtcaccgaacgcagcagccacttcttcgagagtcttttgcttggtttccctggacaaggttagcctcttaaattcttttgatctctttctcttcgtctccgatgaaacaagttgaagggaaatatattagcgacttacgggaagtaaaagtaagcgatcaccaagaagaatgcagagcagactacaaagacgtagtagtagttctcgtggatattggcaaaagcactgggtccagcttcggtgactattttcggatgaagaggttagcaattgcatatatagactatctttcacaagaatagatttcaggcttactgccaacattaacgataaaatgagatgcggcggcaagacccatcaccttgctgcggagagcaataggaagaacctcggcgccatacagccaagtagtactgttgagcatgccatctaagaagaagaaaaacccccacgttagataatttcttgcagccatggtccgagtccttacaatagcaaaccacaaagaggtaaattccgagaatcgcgaaaccctttccgatgtggttgtctgtattctggaactctctctgcatcaccgcggcgtagatttcgatcaggacaataccagccaatccggtgatcagcatcctgtagacggttagcagcaggcatgcgacatgataacccagggaatatacttacttccgacgtccccattggtcggtcatgtacattgtagtgaccgaattggacaaaaaggcgatggtaccgtagactgcagccagagcgaggatcgtgtgtgacccgattccaaggcccttgtacagaatagctgagagatatattaacatcccaataattcccgcttcggcgctcacaccctgaactcactttgataatactgaatgacattgacacctgtcaaactcgtcatcgtctgcacagcgatagagctaaacatccaagttagttccagaaatctcaaatgcaaccaaacaagaaataaacaaactcacacaagcacccgatgtctgaaaagtttaaagatatcccgcaaagaagtcatctccctctccatctcatactcaatctgcgccttcataagcccaaactcctcctccatatcatgcaacacaataccacgccgaatgcgcgcaaactcgctacgcgcaaggtcaatcttcccctggcgaatcagctgtcgcggcgagttaggcatgaaagtcgaaagaccaatgaacatgataattccccaaggaatttggattcccagaggcagccgccattgtatggggccgtagggagcgtagctgcaggcgtagccgacccagttcgacatcattgttccgaatgagatgccacagccggaaataccgccgatcagaccgcggtatcttggatccgatatttcactcaggtagattgggactgttgcaaccaggccacttagggggatgttaatttcgtttatagatctggtgaagagtatgggtggcttaccctactgcgaacccggctagcacacggccggcgaggaacatgccgatgttgacggaggcggtttggatgatagtgccgattgtcacgatcacgcacatcatttgcatgaagcggattcgaccgagtcggtcgccgatgaatgtttgtgttagggcgccgacggcttcaccggcgatgtacacggccacaacctaagatggtcagtctctgggtctgttccgttggggtggaggttaaatggctgggtgaacatacagctcctgtgacgccatttgatggcttttgcatataatcaatccagctttggtgggcaatcgctagtaaatccttagtttgagttgcaaagctagaatttgtggataataactcactagttgtggcaataccagtatcgaacccctattcattgaagtcaacttcgtggttgtacacggtccaagaccaactgatcttggaagaagaaatcaacttacaaacaagaacgtgcctatagcagcaaagaaagcaatacccagcgaataccacatcgccatcttgaataattctagattctccgcaggatcagatagggaagagaagagaagagaagagagtacgtggatatccaagaactagaaacaagaactacccccggtatattacttgatctctcacaggagcaagccgggctatatccgatgggccgaggatgcattacacagcagacagacaagtgacagacgacacatacgcctatactcggaggagggccgaggaaaacaatttctggggaagcggggaaactggggtaggccgtggatacgaggagtctccactacaaagaacttttcagggccattggcatgttttgagccgttgagtctcgcaagattggaagatggctggttcgaggctctcgtttggtcccccagaatacggggttggtgtcctcggtgaagatctgcatcttcatatcacattctctcagtttcggtataacgactcccggtccgtatgaaatggaggattcttgagaaccgggttcttggcaaccccctcgagtctcgcccttcggtgttttctcgccttgattctgctaagctcggatggtatattttgcttcctttgggaatatacgtggactgaaatatgtcgcccaggaggaccttatcaagtgttcggggagaccctgatgattgtgcagagtgtagtccatcagtgactagtggtttccgaatatctctttgacaaaccgtcagtaagctaactagaaaactcgggggtaaatgaagcgaggcatgggactttgataagtctcacgagatactccacgcataagagtggacccataaagggagtcttggcaagaattggggggatatactttgtaacccacgccgagaactctacatggggaacatggggaatatttgagtgaacatccaagagcacaatgaacagcaacgcgtgggggataaagtgtatcaccgctgatgagggtactagcagctctactgtgaagcaagaataattattcaacaactcataatccggtagtcatagatggtgattttgaatagttaaattcctatttcatttttccattgccaatgtcatatatgctccgcaaaaacagcgaagcactttgtgcaatgcagaaaacccagaagccgaacaaggaaactgaacaatctagaaaacaagggcagcacccttggtcttcttgtcaccactgtaaaagaaaaaggcatgtcagcactgtatagcgaaacagtcaagcaatatgtagatgtaacataccccaactcgaagtgcttgcagcgcttcagggcgagttgcttcttggccttgcaagcagtacactcgagacgcaggacgaccttcttggtggtcttggccttcttgtggaagacgggcttggtctgaccaccgtaaccactctgcttccggtcgtaacggcgcttaccctgggcgaagagggaggcctaaatcacaaaggatgacatcatcagcgatagctcacgactaccattccggtgtcgagggcactaaccttgccagccttgtactgggtgaccttgtgctgttggtgcttgtggcactccttggacttgcagtacgtccggcgggttttgggaatgttgacctgtgcggagagatgtcatgagcttttgtctttctggtctgattgtgcgaacaagatcaatgtcaatgtgattcgtgccccgaagtccgattcgaaattagtgcggtcgcaaagagataggtcgtgttgtccagtttgtagttttcaaggagtagaaagtgcggttgaataaaggatggcggggtgcacccattgtgatctgcttcctgagtcctgaatttcatcacccagtgttgttcttgcaggtttcgccgccaatttcctcttcgatgccaacttttacattgcatcctgcagtgaatccggtgaaaaacagacggttgggtagttcataatgtggtgattcacgacggtcggcgaaggaattgacgatttcgaggttggccgcacagtagacatcacacattctctccacgactcgagcaacttcgaatggccggggcttgcggaacacttgacatatctcgtagggtgtatccttaccattttgactgacttggccggatagctgggtggtggtcgttggattgtcgcttgtcggaggagagcaagtgcgattgttgggttgtgggatttcactcgcttaggccctatcgggtaggcgctaacccttttaggagtcgccaagaagagtatgctgagtcatttataatgttgatgcctgaggctttactgatctcactgatctcaaacgtgttttggagtttggagttgattctcagcacacatcttgtattctgctatacaaacccttctccaagtacaatactatcccctagtccataccaactcctgcctttgatcaattccaaccccttctcatgacctatcacccattgcccttgagacgggtcccccaatctcctccacatatttgagcggagttcatgattgagatcctcgatcctatcaataagttgaaactttttcttctcaaattcttctggggaatccggctttatttctttggggccaccaggcgcaataaagcgcgcaatagtgatatgcgcagaaggtacggtatatctagccgcgattggacaaccagattcagtcacgatgttgtaaagatcgcttcgcagatgatgatatgtgaattgatcatgtttcccactataatcactgatatcttcctcgccagccgcgggaacaaagctcaaagcaatagcagaagtatcgtagctgattactggcttgaccaaccgggcacggtgggtgagagtgtagtttgccagctctgctacgaccccgctcatcttgagagaagaagtaatctcatcaatttcaggtcccctgagtgcagacctgatctcgagcgtggtcatgtgcagatgatgcgggggtacaagccagagacctgtgttgtagaatcacagttagaacagtctctttgtattttccatgggttatgcatcgcacacaccaggtccaatcaaggtaccaatctcctgctggatcttgtagaccaaatcccgaatatgctgtggcgggcgtgcccaaaaggcaaggttgtgtctcgggtcaacgtagtctgtcaaccccttctctgcctcgagcactttggacaggatatcatcctcgttccattcacagaatcctttctggcaaatttggcttctgaaaagggcatttctattgcttctatggacctcataggcaagttgcaatcgtttctgggtgggactctcagcatttggctgttgagaattaaagacttaagcttaccgggtcattctcagaaacagtgatcaattgctggaattgattctccgctttcgcaatttgcccgggttcattggccattttttgggggttggactccggttgactagtgaatcgtgattctagcctgtttcagcggggtagttggggtaaaactgcatgcacataagaagtggaaatctatactatcgactttctggctatcaaggggtaataatagacggtgaaaaggattatagttcgcgaatcaatcgctagtcagtaaatatatttttcttttcattatatatttctgaactctgaagctcaactcatcttcgaaaacggtgtccgaatcaaaaaaaacatagtaagatatctcatcgttctcaaaatatcctagttatgttctctacatcaaatcgtataactacatagttacattgtcgcaagccaaagtgaggctccgacgcaatcaggcaataaggccacaggcccccaccaaaaccccgccgggctcacatctcctctctaaacactcattgacaagagctgtacctccaactacattgcagccgacatataccttgctccattactactatccaaaccaccgaaaaaagccaccgacgcttcaatatgttgatcaagtgcgtttctcagctccagcatgtccataccattgcatcatcgaatgaccccaaaatgtgaaaggccactcacccctagacttgcatgctgacatttcgcgtccaaacagggtccgaactctcactggcaaggagatcgagctcgatatcgagcctgactacaaggtaaaccacccgccttgaggcatttccggctcctccccgcacggaaccactctagcgttctaccgaatcaacacccacaaaccccgctgcatcaacgccctctgaatgcgcctatactgatacggacggttctattcaggtctcccggataaaggagcgtgttgaggagaaggagggaattcctccggtccagcaacgactcatcttcggcggcaagcagatgtaagaaaccactcactcagttatttccccctactcgaacaaacccaagctgacaacttttcattaatagggcggacgacaagacagcctcagaatataacctcgaaggtggcgccacgctccacctcgtgctcgctctgcgtggaggatgcgctgcgatgttggtgtaacatctttttgtcatttttagataccacatttctgcagcaatgttaatcagttgaggaactagtgcttttccatcccgcatcccattttgcgaggattcgaactgcagggaccgcggcggagcaatgggatttgagcttaaatggaaaggtagttgcatactgggtgttctgggttgaatgattttcatttattaatgtcctcttttttttcctcaaggacctaagctcctttcatggactggcttggttttgctatacccatcttgacactacttccgggctttgtagatctacttcagtatattcgcgctatgcggcgggataaagacatcagtaccgcttactatgttttgaaatgaagccctgaaagatgttgtaaaatagcctagctgactgagttctgaacacaataggtgcgaccagcagccttggttgcactctccgaaatagctcaacttgagaaagtcgaaggatttccagtcttttgtacgcctaagtcattcgcattgttgaagagagggatatagcttgtagcattggaaaatcagggcccatatcaacctgataaacagagccggagttgtgaataagaatgtaattttagttaataccttttataaaaaattaccaccgagtgaatcgcaagtggggtgaatcccaccccgggtatcagaacgagcctagactacctatgtcccacataggtatatacgtagagggcctcctttcggagagcatatgagcatatgaatcaaagtgatccaaatatcacgataaatgtcgtcgctttgccggcatgaaaatgctcggcgccgggcgccgacgaataacgcccgggcgggaaagaggaggcccggaggaaggtgggcgggaggaggggagagaagaggtgtgagaggcgggaagagatgaagatgaagaagaataagaagaagagggtgtctcggcaccacgaaggggggaggtcggacggcccttcagcttaggcatgggctcagtggccacagctggcgacttctttacgctagacgaatcgccattggatgcaccacggggtgaggcggtggaggcggtggaagtcagtgcgcgtagtcgcgcctcattcttgccgagcatggggtgctgaagtgagggtggaagcatgccgggccgccggctgattcgtgggggaagaggttgcgcctttgatatcggctgtggtgccggctgctcggcggggcggcggtgttcttcgaccagaccgatcggtgcacgcttaacttgcgacgcacggttgttgagggacttggtaggcatcgtcagcgcagtgttgcgtttctgcggctggaagatactaggcttcttttcaacaccaccgcctatcctgcgatcatatggagcatgacgctgtcgcacagacggtcgggatccggccatgcgcaagcccttgctctcgggtatgagtttgggggtgaggagtgcacgctttgcactgatgccgtcaatcgccatcttcattctctccgcatcggcatcaagagaacgttggacttggtcgcggagatcacagtaaaccccataccagttgttggtactatccgggaggtggtacttttcccactcaggaatgtcccgtttaatgagctcaagccacagttcttcgtcttcttcggcgaggtggggggatgcgagctccataacatgctacagatttagaaagaatgatattagaagatgagcttgaaactgaaaatgaagcgcgggtgaaagaatagttagacagtgaggtctagtagacgtaccagcttttcggggttatggatattaagcaaaataggacgggcgagtgagtatggcatggcccccagattatccaggtctgaagatcacacatttagtccggagtcttgcaaaatgagagagctcggttcatctatacctttgatgaagcggatagccgtggctgtagccaggtgaagcagtgatggggctggcattttgcttatgacggcaatggttcaagccgaattgggtaccataagatatgcgacatgaggtgaaagcaagtactagatataacagagtatacgaggcgcagtcgcattcaaaagaataaaggacagaccaaaagatgccagatgcgacgcgattcttgtggttgtcgatggtaggagtctcggctttaaataaaaggatgatcacgcggtcgacgctgattggctgcgtcgattcgttgcttcatttgatattctttgttctaatgtttccaagccacagctacggactctactgattgaatattcgtaagatctgatgtctgctcaagtgagaattgatggcctgcatcatcaagatgcctactcgaggaattcaggcttcattttgtcgttactcgtgaatcaaccacaacgacgacgctatctcttgtgaatctcaaaatcaacctcgttgcccctaggattatgcaatcggcacacatatactccgtagcaaccctggaagtaatgtcagatgctttagtttatagtacagacgaaaccttcatttatccatttatacgacatctccagattcacaaagtattgggaggtcgctgaaatgccgaccataagctcttttccctttcgaagcagctttttatattccagcggcttcttgcattcattctgtagtgtctcggatccattgtcttcggaacttgtcgttgtaagcacgtgatgtccagcaaacaatgcaatcatcatcttgatagcatcatcgaggggcatttcaaagaactttgagaaatcgaaaatcagctcaccatatcactaaattctgcctcagatacgactcacaggtacgtctattatggtatctgtttctgccgtgatgctcgtctatatacacagtgcctcgaacaatggtaccagcaacgctagtcgtactgctatcattcgagcattccaatagcgtcgattagaacatacccttctcgtcatatggcgcctcttttggcaatatcatacaaggcctggactcgaaacctcggatacgtctgacccttcacacagataatcacaatggcaccccgttcgcagctcgagatcaccacttcctccgtgacccgcttggtcaaggaggaagcttcttatcacaaggagcttcagcagcaggctgaacgtatcaagaagctggaggctgataccactggtggcgacgagaaccgcgagtataccctgaaacaagaggtatgtgccttgtacatgagctttgcttccaccatatcatcttgcctctaatgctgacatgaacgatagcacatgtctcttgaagagaccaagaaggttctgcccacattgaaggagaagattgtgcagaccgttgcgaacctggaagctttgattgtgagtactacctatctgtattcttggattctattaaccaaatttgatagatcgaggagggcaaaaagggatcggacagcaacgttgagcaaatcaccgctgccaaagaagccattgctcaagccaagaccgcacagcgcgtgatttcgtgaaagacatgtcaattacatcagagcaaaaaaaaaatacccataaggtggaatgattccatagtatcattcaataaattgaagccatgcccaacgccggaccaaagaccagaactccttgctagtgctagtaatgtacatgccgaaatgcatcttcaggtagtatccatcttcccgctgaaatcgtcggggagttcctctccttcctcgagctcggataattcgccatcactaaccgcagaaatttcaccctcatcaagcatattggtatcctcccgtgccccatcgccctgagcagttgtgacttgccgcaaaggtgacgcagcaccggcagccccgggcttctgaacctgcagaccagatggccgaccggcatcgtcttggccgtgttgagagggggtcatggcatcgttttcaggtccaggaggagtgtttccactgctagccttgcccttggatgtgacatctccctcgtcgccgtcttcgccctcctgcatgccttcccggcgctcgacttcctctttctcatcgcggatcaggcgacgaagttgcatcccctcgtccacaatacgaccgaactgctcacggcgctcagcccaggtcatcgcgtaatccttgctttccttctcgagatctgcaatctccagccgtaatttctgaaggttcgccgactggtcttcgcgcggcttgagtaggcggttgctcgtgattttgtccgtcaattcgtcataggtctttcgcaaggagagaagtcgctgtgcctcttcaagctgagttcgtagatcggccgtgctttctcgtacagactgcattgtcgacagaatctgaactcgctcggtagcatatcgctgtcgttcttgctcgttgctggtaagaagaaattgcacgcgggcaatgctgccctcaaaggtggcaaagtcgagtgcgacatcctcgcgaaagtggtgccattcttcgagtcttttctgtttctcggcttctgttgcggtcgcatcggaatcggcgtcggtctcttcggggggaggggtgagagggagcgaggatcgcgagacaatgagggaatcggggttcaatagtcgttttgagattcgcttgaatggcttttcttcgacgttgaggagacgcgacttgtggagcgcatctgtaaaagctgggccgttaacgttgacctgggagaacagagctggagtggactcgaccttcttctggctggcctagcagcccgtatgaagccattttgtgtatctgaatatgaaattcgatctcagagtttaataaagcaggatatatgtattgaaagggtgcacggcttcaagctgatcgaagcggggagggatatgaaaagtgaagccgagcggtctggcacttaaactccgccttaaccttattgactccagttaatagccatgattcaaccagttgtgctgcataacaggagtaatcgactttcttttacatattactcatagcccccgagcttcttggctagagaccatctcaaacctacccagaatcgctcgcgtgcttacttgaggatcacgctgtactccgcaatcccaagctgtttgcaagcacgacctggtgaagccacaaccagagactcgatgaactttgccgcgcaagaatctgtgactgctgtcctagctactgatatctttctgtcctctgtacgtgtctcaggttcatcgctatgacggagatgtattccggcctccatgtgggccagcggttttgctctctagaagagttcaaaacagtggtacggagcatatcagtgagacaacactgggagcttcgtgtggtccgtagcaacaagaagagcgtggttatcggatgtcgatcatcggcaaattgcttctttcgtgtcgtctgtcgctcgaacaaaaatgcgacctacatcactagtcttcaagacagccatagttgccgtcggagtgaaaattcccctgaggacacgccagctcgctctgaagcttctcatgtgcgatttctgctgagtgagatcccgaagcttttcgatatgaagtcgaaaatacgagcccaggacgttgtggatgctgtaaaacgttaccatgggtatgacatatctctgcgccaggcacagcgagcgcttaccaaacttcaaccacgacatgctgagggccaggatgaacatgagctgaatatcgagatgagtacggaggaacgacagtcgcccgagcaatcccccgagtcgcaaggggaaggggtacacgcatatggagacatatctgagaatcactggctttccgagcatatcgcatcatcatcaattgatgatgataacgtgtccccaatcaagacccccaaaaaccacgtacttgctccaccatctagttcccaagccctgccatctccaccccaggtgccacacgtacatattcccacatcaaaccaaccctcttttaatcacagccaacatccaatgtctatacaaacaggggcacaatgtcagaccgctgcctctttaccagtaggaatggctgggcgtccgaaagactaccctgagcgcagtgatcatgatgccgccccccagatggttcttaccaatttcaagattgaattcacctgcacaacctgcgggtcactgaatcagagcttcttcccaaaccagggcaatgtcaccggtgccagctatatggtccatcatgctgtaccgagtcctggcattatcccaagacacgggtctactcaaaatggtgttggtggcagtagcaatgcagtcggcgaaatccctgcttacgaggttaatgcttccaacacatctaccattcagaatgcctggtctagtgatggcctaggggttcaaattggatcggcacatacctaaaatatcatgttaagaggatgacatcggccaccgtgttgctgatattggtattcattcttgcacgctacaacctgagccaacacgagaactagctgactttactcaatgtatggtatttgatgccttggccgttccggtctcagaatttctacacgttctatgagacgtcaatattagaagtttggatgcttaatccaggacacgatggcaaaatctaacttaactctgaagagggttagtttgatgagtcttttctgggatctctgttttgattttgaccctgagatctctatattggttcctcttatgccgaggaagtaatatccgagaatgacctggggctggacgatatcatcagggctaatattgttatgaagtcaacgagctacgccgtttaatcttgttttgataccacctttattgaggggcgaatcctatctgcttagttctgagaccatcggctaattgcattctgagtacgttccctagaacaaagtttcttcccccatgcagagctggacgaccttgcgcaaacccgctctccccaattggtaaaaacgagtagaccatggtgaaattttgaactacttagataaatttgtggcgatgttgatagaggaagagagctaggctatagaagctatatcaaagcccaacggcttgccttcgtcaaaaatgccctcggttatggactcgcaaagagttcagcataggcggcggtgtgacgtcgctaaaggtacatatgcgtctttcaaataataataatagtagcccaattggtcaaagtgaccacacaataagcgatcaagcagaaaaatagtggcgacacttactgcggagaaatatccggagataaaggcctaaattcctagattcggtaactagttagtcagccatcggaggtccgatcggatatccgaccccacggatccacaacagactctgctcttcgtcaaccgcaccgacaaaatgttacggaattgagccaacagtgtctggatcgccattcatcggggcgatattgggctacaatgaaaaccaggcacacagatactcacttgcatcggacgtggatccgatatgacatctgccagcggcgctcaagctccaatcgctcagttgccgatggatcgaaaggcactaaaatcctgccagggaaaaacttttcttatcaattgaatgactcttatatgaacagacttgccgtgggattattagcttatttctttaaataacattaggaccctcctcattccatacaattgtgcttcggatagtataacgccaagcccctaccaaccttaatatactccgtgtgcaatatcttctacacttcaagctccatggccttttacggaacatctcagataatctaagggaaattacctctttgagcaagcttggcaccgctacatctgcagccatgaatcgacaacgagaggccgaaaaggcccttcacgaccaaacaaatattctccccttcgcgcaactcatggttgtcttcacgggccttgcaatttccttgctgatctgtatggtggatcagaatggcatcagtgttacactaccaacgatctcacgcgagctgggtgcccaaaacaccatttcctgggctggaacttcgtcgctaattgcaaacaccgtgttcaccgtgctgtacggccgactatcagatatctttggccggaaagtcatgtacatctccgcattggtcttgctgtgtattgcagacctgctctgtggcttgtctcagaacccggctatgttctatgtcttccgaggcctggctggtgtcgctggtggtggtgttacctctctgacaatgattattgtctccgatatcgtgaccctagaaaagcgaggcaaataccagggtattctaggtgcatctctgggtcttggtaatatcattgggccgtttctgggtgctgcattcatcatgcgttcaacgtggcgcggtttcttctggttgatttctccattggctgcttgctctgcagtcgttggatacttcctcattccgaataatgcacgcaaagataacttccgtgagaatattgggcgcatcgactggttcggactgctcgcatcgtccattggtatcatttttctcttgattcctatctcgggtggtggatcctatttcccctgggattcaccgatggtcattagtatgcttgtcattggaggttgtgcaatcgttgcatttttgcttattgaatggaaagtggcaacacttccgatgctaccaggtatgttttgatccccccatagtagtaaaaggacatccagttgacataaaacagtggtcttcttcaaaaataaggtcatctctgcaatatttttgcagagctttctgtatggtgcagtctaccagtcaagtctttactatctgccattgtactaccagaatgcccgtggctggtcgccaattgcctctgcggccatgacatgtcccatggttgcggcccagtcaactttctcaattgcatccgggctatacatcacacgagtaaagcgctatggtgaaattatttggattggatttggcttgtggactttgtacgttgatcgatgcctaaatgctcttactttggtcccatactgacgatatcattttcatagggggtcgggcctcatgttattattcggtacccacacccatccggctgttattgcagtcattgtggcagttatgggcgccggaattggcttcacattccagcccactctcgtggccctgcaagcccattgcactaaatcccaaagagcagttgtgattgcgaaccgtaacttcttccgctgcattggtggttcatgtggcctcgccatctctgcagcaattctccaggctgctcttcgctctaatctaccaaccaaattcgcgtacttggcagagtcttcgtactcacttccttcaaaagcgaacatcagtgcaactgagtgggcttcaattctgctttcttacagcaaggcttcccacgcagtattcattctgcaagtccccgtcatcggtgtatgtttcctggcatgtattttcgtgcgtgacagaggtctggaacgaccgaaagagccggaagagcttgaggaggaaaagcgaaaagcccaagagagagatgccgaggcggttacttctgaatatcccgaggagtgtcttgagacataccaccaggtcgagaagcgccattctgcgtcaacattcgccgaatcatccatgccgccttcccgggcggaacctaatactgagggatatggggagaaggagcagcattgaggcatgtactaaagcatatagggatctaataactctttgatttggctagatctggattttcttgggtggcgtgtgataccaaaaagcaaaaattttgtatagtttacgatatattaatataatacgagcatcaattggcgcttatgattgtccgagctacggagtcttgatgtcaatattgctatctggtaaactggaagttgtaagatgtgcttctgattgcttcaacccttcgaaatatctcttttatcacaagtagtaaaaccgcagaaaacaaagaagcaaaaagttcgggtgtttatcctagacgcctcgtaaactataggctagccttgatactaggagacgtcttgtcttggcattccgatccaacgacatctccgatctctttcaatctcaatcgcacctacaatggcgcttcaccggcatcttcatgttccaaattaaagctgatattttccagcaaatccgatatgtatgcgcccgggcagagctccgagtcatcaaggcagacaagtcccgtatcgcgagatcataacccgcggaaacgcgggaggacggcatgcactcgctgcaagacacggaagcagaaggtgagttccaatcggtaagatgactacaagtatctcgactaacggcttgtagtgcgacaacgaatatccgacttgttcgaactgcttgaaggcgggtgtcccgtgcgacaagtccagcgtccgagaggacaaagaccgtcagaatgagtaaggtccaagtatatgtagtagccgggaaagaactaatttggataccagttacacacgtggcttagaggagcgtgtactgtttcttgagcgtaaacttgtggagtcggatcgatcatcagacgggaataccgctacatatacggcgtcttcgctgttctctccacaaggtggtaacacaacgccacacacagctacctctggatttgacaataaccccgttggagaaatcgtgggccttcttgccctgagcggctctgaggcccctgcatacgtaggatccagttctggtctttcactcgctgccgatctgggagagatggtccaaacgagtgtatggaaccaattcatctcaagaatgcaacataaaactaccgccgccagtagctctcgaagtaaggctggccaagcacacgggccctcggagcagcccagcgccactcaaattcgagatcggacaacgagaatggaagatctcttgccggcgaatgttgaacctccaactgatgagatgggggcaagaatactcgaaacatatttcacccgacttcattctcgatatccatttcttaataggaaacatgtatggcagattcatggagatcgatggcgattagcgaagatcaaacgtgaggaccttactcggtctgatcgatttgctattttcaaactcaacttggtctatgcaatcggcgcaacaatgcttcggctgagtgagaaatatgcgtacacgactcccgaggtaatcatattcattaagcgttaagactggccgacacttacaagttttagcgattctatactgccgccttgcagcatgttcccacgatgtgtgaagcacgatcgattgataatatcgaggccatggttcttcttgtcgtgtaccacctccgaactgcgtccagtcatggaatgtggtacatgattggacttgctatgcgtactgctatcgatctaggtctccaccgaaaggcaaatgaaagcaatctggatccatttaccactcagatgcgacgaaggctattttggactgtatactatttagagcgagtggtatcaatgtctctcggtcgcccgttcagtatatccgatcgtcacattgatcttgacctcccactagaagtggacgacgacattgaagaccccacactactcacagcacccctagatccaaacaagaccacaactttgacattcgcaatttacctcttcaaactccgtcgcatcgactcccgcattcaacataaaatctaccgcgcagaccgccccctatcttctctccgaccaaaaatggaccctctatacatcgaattggaacaatggaaagaatccgccctattacgattcagcggtccagatctcgactacccaatgctgcacttcaaccgagcagtccgactactaatccagccattcctccccctcctcccaatcacggacccatactaccaaatctgcatcctggcagcaggaaacatatgtcaatcccacaaacgcctccaccaaaccctggagtatggccactccttcctagccgtgcaaacagtcttcatggccggaatcaccctcctctacgcgctatggacacacacagaccaagtctggtccgtccgcatgagcaacgacatccgcgcttgctcaacagtcctctttgtaatgggcgagcgcgcggcatgggtcaagaaataccgcgacgccttcgagctgcttgtcaatgccgccatggagaaattgcagggcaatgagactgcccgcaatgccggaatggcggagctgatgacggcccagtatgggattaattggaattctactactgctcccggcatgtcgggtagtgataagttccccccggtcaacccgacggggctggctccagatactgcgggtgctacgccccagccgcagggttgtccggctgatgattccgagcacgcggttaggatggcgttgcagctggcgccatggattgatcaagatgagagtgatcctctgtgggtgccggactttgagactttggagaatctttctgggactttttggagtcatggtgatacgagactctttgactctatgtgatgtctttctggaccgttcattgtgcaactttcctattccttctattatgcccatgcgagggatggaatatgataccctatattatgatataataggacagatcgcattttctaagatctgcccatcatggcgtgggggcttttccatgcttgtttcgtgggacttatcgaataataagagttggcaaaatgccagcccctaccccaattcaccgatgaggaaattgagccagtaatttgaaaatacattcgacgaccgactcctaagctcatttctatgcttgtttggtgtctggtggtgttttgcgaagtagtcgaccagcatcagtcagtctggtttatggcccatattgcatgtttttgtagaggaatttacgttcatgatgtgttcaaggcggtatatctgtgaaccaacctgcaagatcaggcaaatcaagtctcccaaggaatccaaactcttcctgtcccaaacttatctcatcccaagatgtaaaaggattgaattccatgttattgggttcgtgacggagattgtgttcgtctgatatcggctcagtaggctgcgatgacaaatcaagtgggttcagttgttgattgtccctttggtgcagctgagtggaaactaacgaggaaacaacaccaggccgacaagtagctatacaaaaattagcctgtacccagtgaagatctattactaaacaacaaacccgagtagttttgcattatatgttggtgcgtcacttgcaagaactgcaacgagttgcgggcagagagactgaacatggccataaaagctaagatctcttcgcacttgcgccaactcgcatccacgatttttgaatctacctgctccctaattgaatggcaggaatatgacattatcaggatgatccctgcagtggatgtgtctagcagatgttagttgacgatgaataacaatgagtggaatcgatcacgaacagaacccattgtaccaccatgcatcagttacgcttgttcgatatgtctcatgaacaagtgagaccagatctatggctgccatgacgcatgaggaggcacatttcgagaagactgaggagtatattatatttttctcgccgagctgtacatcagagcggcgtgatgctcgctcatcggagcagagttgagtaaacatggggcgatacaatagaaggcggaggtgaatgaatctaatttgtttttcttttagtcagaaattgtaactcaaaatcctagagatagaaacaagttacctcgcacgtaacacattctgctgacgcttgaaggttgatgcattgccaatgcctgagcgatgcaacgaaggttcatctgtccaattcaagggctggggtacgttagcctcataagcagcaagtttgtcgtcgagctccatcaacacatccaggctacaaagcttggagcttcgcagcgaactagtgcgagtgctatttgatcgactctgccaagcgttatagacctcggatagaatagactcgagaattttgtataattcaatagttgaaatgtggaacgtcatatatcccagcttatgatcgcagggttgtccactaagctcacaaggatcagcttcttgggagtccgttcccattgcaggcagaggcaacggtgaaatatgagaggtcatgctcggtctgccatgtgtcatgctaacaatcctaatctcatttgttagctgtgtgtttaaaaagaacagaaaagcgattgcacaaacatatccataatgacgcagctatgccatgttcgccgccgtatttctatttccagaggcttgttcgaggaatgtatgattgtctcgtgtaatccgagtccttgaccagctcgacacgccattccaactgcattccagcaccgattcggataaggagtactttgaagaagaagtgaaacaatcagaaacgtttgaaccacgccgatagtacttatgtccagaagatcaagattcacaaatcgctttgagcgaaggaaaaatgaataaaccgcagcctcccgatccgcaggcggaatatccgagaaatagcagccaatggcaaagatggcattgagtgcacaatggaagacaattgaattaggaccgcaatcaaatgcgcccccgagtccaatattgagctgtggcaactcaggcttggatgccttatccgattcccagagatttttatacgcttgctcaaaactagggcgatggaaaaatggaaatagacaatgtactctgtccaagtaacactcaagaagatggtctgccagagatcgagggggcaaagagaagtcgtcgaaccgaagatctaccgatgggtggcctatatctcgccaaatccccttatcagagccctgggatcttgacgattcactcttgttgcctcgcaaagctgacatatatgactgcaatggcatcgactctcctgctagtcgcataaaagaggccactgaagagttcccatagtattgctgctcctgtggagagtctgtgcctgggtcgtcttctgcgacagatattgcacccatggcggtgacattaccgtgggagttgagagacggcgaagcatatatgctgcctgctcgtgggtgggcagattcaggagacagatgtgaatgtgccgcatgtggggatctatagcgctcagcttccggtcgattcctcggcgtggggattcttggcggttgaaaagtaggcgttgaagaagacagaggacttggtccagatggcacaggggtggatcccagtcctagtaatccttccgcggcaacagatgcccttgattctacgtccagatccatatcttcaccgacaaggctttgacttgcagatgcccggtagtttttatgttgcgaaggcccaggtggcacagcaaccccgcctttcgcgcatgttgcttcaagctctcgaatacgatcatggagaatcttcaggtattcatcattgctggcggaccttgcattatccagcttgtaaacacattggtcaacagtatacgagcgtcgagcgcaggggccacaaattggcttgataccatcgcacctgacctttttatctcgacaagactcgcaagccagggcaatcttgcgacgccgcggtggctcccgtttattaattccacctttgggaggcatctgttcgacaagttgtcctataagccacagctgagtgtatgtgtgacccacaatattgctggtacacaattttattggtgacccgggtggtgaccggaagagaggagagaaaagcagtggaacaatcccgagactgttgttgtccggaatgtacccggacatatagtcacgtgtcataccccgcgaattaggaaaaccaaacactacgtccactactccgtagttacaacagagataaacacgccgattaaccctgagttgctataattggagtccttggtcagaattgttagaacggacaagaggaaggtcctaccgacaacgagatactgctaccctaatttagcttatttgtgtcccaattaggggtagtgattgtcggtgtcggcaggacctgtatcagacgtggagcgggatgcacccggtgtgtgctgagagatgaatagtgaaagtaaagaataatagtactactactccatcaatactccgcaaatatgtgcatatacaattaaagagcatagagaaaaatacagtaagtcaaattaggaacggatgtttcgtagtagaggacgcggatccgcaagtactatcccgggtgcatcccggaattgacgagggctgcctcattattaacgaggaaccttgcttgactgaaatattaggagaaatttgaccctcttcacttcctgaggtctctctttgattaaaaatccaaaatcaagtactgttacatcgtcttccacagaatcctaaaccaatatctaaaacccaaagtacaacatcggctggatacctgattatctttcacaattcaaacagcccattaccagtttggtatttaccacatctccgaatggaaaacgccaatcagacgattcaaaaggactatagtactctttcacattactgtccctggcaagacgacagacctcaaccaatctcccgagaccaatggcccgccgaagaaggtctacaatggggttcagatcccagtttctgctatcatggcttctctagtcccataggtacatggacagaggagcgcctggtccagaacctgatgcggaacatggctggtttgtgtaccgccatggacattgactttgatgttcccgaaagtatacatgagccatctcagaagaatctatcggaactggatggattcacactcccaatatttcagacctcgatggtcccacaaaatggaagaccctccgaaaccccatcgccatcttcatcctcgagccaagcccaaatgttctctttggatgatactgaatgtacacaacgggcgagctgtgtcaaagccagaacccagtccaaacaaaggaaaagaaagtgtgtgcaaaggccaggacagaatttatgccactgccgatcggaaaagaagaggagagagatcattggagatcgatataaagaactctgtcacattgtgccagggcttgagagacagtcatacacgagaaaatatgttctcgaggaggctgcactgtggattcaaaaattgattcaggacaacgttgcccttcatcaacaactaggggagttgaaggaacaggaaaagttgactcagttgaggttatttcctgtcgagaaagacgaacaggtgggctgctagtcctagcattatttttatctaacaatactgtcaatatctgcgcatgttcatttgatacctcacggaaccgagcactatttaatgtaatatgattagaggtctttcagtagtttatgttcgtgctatatttataccttaaacgccaggccattctctatctcactggtgttagttgatataaagaggccaacttctttctaggtttactattcactcttcatctctctctttgcctcttctttctcatcctctgtatattgaatataccatgccctagaatttcccaagaacatccatggcttagtgcctaccaaggaggagcaatggcagcaatccctttacccaatctctgaatttgcgcagcatagtacgtctaccaaactcgttagcaaaccgcctaaagcacccaaaagcaaaagaaaaaaacttacgctctcagccccagccccaataagaggcaacggcaagaaacgtgtataccacggaataggcgccttattcaagggcatccgcgcctcgtcgtcgccgacactctcatcaagcaacagacgcgggaacttcggatcaatagctgcaggccgcccaataccaacaagatcacaagcattatccttaatagcagcctctgccccagcacgcgtgcggaacccaccggtcaacataagcacaagctcaggatggcgctgtcgcacctccttcgagaactcgaggaagaaggcttcgcgcgctgcggtgcgtgacgattctggtgctgccggattggctttgccgtagcccatcatctttgggtcttcgtagctgccgcctgagatttccatgaagtcgatgccggcttcggctagaagtgcgatttgcgtcattgtttcttcgaagattgtggagctgtggtcggctgagtttagcttgatgccgattgcgaaggtcgcgggtacgactttgcgtgtttgagagaggatctctaggacaaagtgggcgcgcttttcgggtgtgccgccgtatgcgtctgtgcggaggtttgtctggggttatggttagtattggtgttgggctggtgataggggaaccgagtgtcataccttgccgttgaggaattgatctaaatagacgtaccattagcaaagaggttatacatttttttttaaaaaaacttaccaatcaaatacccatgcgcaccatgtagctcaatacccgaaaacccagcatccgccataagtctcgcggtatcaacaaactgacgaataaccctttcaatatcctgagttgtcatctccttgggctgggtccagaccaaacacccaatcagcttctcaaaatagctatctccaaccttcatgggcacggcgctgggcgcgagcgtctgcgcgaatattccgcgatgacctgcaaggcggaaggactgccggcctgggtggcagatctggactatggccggcgtgccgtgcttttggcaggtgtcggcatatttcttccattgcgcgacgagggagctgttggtttcgctgtccttatattcgctgtgtagagcagggtcgaagggactgcccatgtggttcacgtcgacttgcacgtttcctgctaagatgttagggttgggtgtcctttgggatatgttttgacagtctaggtttcgcgtttggcatagaagtttcgaccacaaaatgggagaattagaccttacctgtaagaatcatcccccatccaccgtccgaccattgctcatatgcatcaaccagggcgtttgtcggctggttagttttggcgatcatctcagccattgcggcctgggagatattagttccatttgtgcatagccgctaggcgtgaataacgtatgtgatttgtaccttgcctagcctattcggcagaacaagcccacaagggagcttgacggggtctgcgaggggagatggcatggcgtatatgtatcgtatgcgatcaatatatacagtgtaaggaattcagtctaatgtaattggcgatatagatgaagtctaacagacacaaaacacgctgttaatgacgttagtctcaatttgctcgcaactcaaaacgcacacatacctctattccagaacaagaatctgcaaaggaaggacaacagacactttcatcaatttgtaactaactagttaatgagaattagctcttagtcatctcgcggagagattgatctccccgtctcgcattgtggagtcttcaggggccgaggtccacgttgaagaaatgtggattgggaaattcggggagttgggttcatccgtcctgaattttcgagtctgcttggtatatttgacgctcagtgaggaacgccattactaacttagactggaacatgttgcgacctctacaggtgttggcgtaaagttgtgaacaagctaaatagtaggataatagtaagtgatattaaattttgttcattcatatggcaatgccagcgaaatgctaactattcccaagatgctaagacccccaaaatgcgagccaaaaaccaaaggaaataagtgttgggtattcaatcaggggaaaagaagttcgtgtccaacctgaaaataggcagagaagaaatgtaagaaacgaagtgcgctcgaaaccaacaaaagacaaaaggggggaaatatcaaaagtcaaaggtgacatgcgagtccatcacgcagagatcctaagcgctgacatattcgaacagatgcttttttttctgcaaaatgcagcatgcacagccaagtctaggacaaaaacaaaaagatcaaatcttacaacttggcattcttctcctcagttggggagccagtcgccgtgatgggtggcgagatcgttcctagattagagaggaggtggccgacctcgctctccagagcacggacctctgtgtgagggtcatacatgcgggccttgatccagttgtccagctcggcgtcgcccatagagcgcagcgcaatctcgcggtccaccttgtcctcctgggcagcgcgcatcaccttgcgggtgacgacgacactgacctcgcggatgcgggtgatatcggggtagagcaggccgcgctcgagctcctcgccggtgagggcagcggagagggcctcgccagaggcgtagatcatactgtctgtgacgcggacggccttggacaagatgctgcctaggccgataccagggaacacgtacatgttgttgccctggccggggtagtaggtgcgggtctcgccggcggagttggtgaaagtgtagttggggaagggggagccggaggcgaagaggcagcggccgtcggtgttggcgatggcagtctcaaagtcacactcggactgagaggaagggttggagagggggaagatgagaggggcggtgttccagtcagccatcttgcgcaggatctccggggtgaagacgccgcccatggtggagagacccatcaggatggagggcttgacgtagtcgatgacctcttcaagagtcttgtactgctcgccgttgttgtcaccgcgggcaaagtagaccttgtggtcggcgagcttgtcaccgcggtcagcggggggaannnnnnnnnnnnnnnnnnnnnnnnnnnnnnnnnnnnnnnnnnnnnnnnnnnnnnnnnnnnnnnnnnnnnnnnnnnnnnnnnnnnnnnnnnnnnnnnnnnnnnnnnnnnnnnnnnnnnnnnnnnnnnnnnnnnnnnnnnnnnnnnnnnnnnnnnnnnnnnnnnnnnnnnnnnnnnnnnnnnnnnnnnnnnnnnnnnnnnnnnnnnnnnnntcaccgcggtcagcggtgacaagacccttggtgtcgacaaggtagaagcagttgcgggcttcgtcctcagtcatgccttcgcgcatgaagaactcgacgatctggcgggcgacgccgacaccggcactgccagcgccgaagaacacggcacggtggtccttgcagggcagaccggagcgcttgacagcgttgatgataccgccaaggatgacagcgccagtaccctgtatgtcatcattgaaacaggtgtacatgtcacggtaccgccgaagagcagggaaggggttcttgaaatcctcgaattggatgacgatactagagatgcattgttagtcgcggtttccatataggacatgtgagaatgagtcacttacccgggccagcgctcggtaagagcagccatcagctcgtccaagaactcccgctcctcctcgggtgagatcttctcgcggcggctccccatgtacagcgggtcttcccggagggtcttgttaccagtgcccagatcgagagtcagaggcagggtgacctcgggacgaatacccgcacaggcggtgtaaagcgccaacttgccgatggggatacccatgccgttgatgcccagatcacccagtccgaggatgcgggagccatccgtgatacatgtgatctcgacgctaggttcaggccaattggcgatgaccgaagccagattcccgcgatcttcccagctcaggtacatacctaaaacgagcgttagcgtctccggttctatttcgtgcggagaagatgccaaatgcggagaagacctcagttatcgctgatacgtaccttcgggctgttggtaaatctcggaccaccgttggcaggcctcgcccaccactggggtatagatcaggggggtcatttcctgcagggattatggttaattttcgtcgccccaagatttcccggcccaatcacgtgtctcggtgcttgacgtaccctgagatggtctgtcaccagacggtaaaacaggtgcacattgttcttgcgcaaagtgctaaggtataggaatttttcgataggtgtgctcttcagacccagctgtgccaggcatcgggtcctttgcgtctcgtagctctcggtgcgaggaggcgtgaggccgtaggtgcggaggtacttgcggatgtatgcagggttggcggtatcgaagttggcgttactaagaactattagtgactgctttcttcattacaagcccgagacaggtaagctgatctgggtggacatacgcaggcaaggcatgattcacaaagggagccgaggtggtatgcgcccgttgctgagaaggatagggagccattgtgattgactgagaagacttcgagtttggggtagaagtggaatgatagaaagaagaaaaagatttgggagcagatgcgagtctgtttttatgtactcgagacagcatactaagattgcgctgggatgttcgtgcgcacatcatccaggagattccgacagggtgatgaccagataaataaccgggaccgcgtgtcaaggcgacacggtatagtaaaaaaataagagtcatgacttgaagtcggaaagagtcggacgaaggagagggtcacgacccatgtggattcattttcggtgttgacagcgaaccgttgtgcatgaaagccattctggaatctggatccctccaaaagctttttcgttttgctttttttttcttttcttttattcgggaagcagatccagcaaggagaagtgtatcaccgtgtggggaccgggggggggccgactccgacaaatgcggagatgcagtcaaatcagtgttgaatatggaattgaaagggcagaatcccgagttattgaatgagacacataatttactatggaaattacttggatgatcggtgcgggatttactcatcattccagccttgcggaactgcacctgtttgccctccatcctccgtacatatcgatattggggacgtgaggggattgggaaattggagtattcggagttggacatttacaatttacacggtagacctcgaactggtgacagctcccaagcagaatggtgactaaagaaagactgtaacctgattggctgcaaaagccggggatggaaacgccatcggtccaaacccacagctacgagcttctagagccgcagatagtgccgaagtggagtccaactctacccctaattgattctattcggtgtttgcgtttctcgtggaattgggatttcctcttgatttgaacttgagcgtcttcgacggtttcgagaaagcgatcaaatgccatttgagaatagaaggcggaggtcggcgacggagattgccgctctcaaaggtcatatgttgcgcacaaaacatcgctagatctataagataggaaaatgatattcgctgttccgatcggaagctccccggtgagacttttaggcctctgtttcgagtccgccgcgttggcgatgatattcggccttgtgaatggctctcggtcgccgacagagggatttttgattacttatgttctctagcacggttgcgttatttttatttttatttgccccctccaattcttcaattgtcaggtctggaaccacaagctttgtaacaattcggaatccagggatttcatatctcgtcaccgattggaccccttgtccgggtaacctgccagctctgtgtaacgcggaaagcttctattaataatattcattcctatgctctgctctacagtgtacatatggaatagttacggagtacggagtacatatctccgaactcgtcagggcttttccctgcagttcccaacgttgggacgggcttggaagggcttggctatctgccgcgtgggtgtacattatagaaatgaatgaatgcattagacatgtcattctgaattacggagtatatgaggcatatatgttcacatgcatattgtctcctttatacagatcaaggtctccctatatgaagtggtacgcagttcaaaagcgcggaatggataaatcgaggatcaaatgaagccaacatcgacatacatcgaaataagcccgatctaattggaactagtacgccgtatgtattgccatggttgcataggctacgtgaatggcccggctaaatccatagctttccccagatcgcggatcatcgatttttttacataatcgcttcattgcttcaattgcttcaattgttcaattgcttcagaatttcatatatcttgatcatttcttaattagtaaaatcttcaaaaaacattccggctttaatatacatacttcactagtaaaaagatctagcacaaagaacaaacatctacgtcacactgtacgggtgatgttgtcgtcatgtgctcaaaacaggttccccgagcttaactcctccctatagaacctcaaccttcattgagcttcatctacggagtactccgtacaaacattactattagctcacataatccagggcctattcaacatgccctccgagactgaacccctcctccctcgctacgaggatgacacctcccgtcagcgacacctccaccaaaagctacatagctaccaaatagtccgcgccatctccgagggctacatgccaacaactgaacaaaccatcgccaacctccgtacccttttggcttctgatgtgctcaacctgcgcaatcaagatataggcagcgacggtcgccaactagtgcgggacagtcgactgtggatccaggtctttatcgaatttctgcaacagaagaacagccaagaccagctccaggagtttttgtggcgcctggcccgttcgcgtgtcgaggtggatagagacaggctttcgagacaggccgcccacgtgaaggcgcgggcagatactaaagctggtgggtcgcgcatttccgcctctgcaactctccagcttccgggcttggcaaatgcaaattacaaactgatgatcgttcactaatccccgcgcgtagcatatgacagcttccgcactgtcgctggtctgctcctgaccaatgctgattttcgtcttttcgtcgatgacgtcgttaccgttggccgccaaatcttcgctgataccactgagtccctcgctgaatcttccaagctcgttgctgaacaagtcaagccgtccgaggaggaagagcaggcgctacagggccccggtgccgatgaggggcatgcgctatcgaaggccgaggtggaggaggaagttgcacatgtcgcggatgtgaccagcaaagggatcgctcagacgacccatgacgctgtccagagcgctaaggagcacatgtcgggccgagagagggacacattgctattccgactgaagcaggcggttcaaaagcttcgggagagaacggactactctgactcggtggcgacacttgctcaattggtatcacgctatgctaagatctacgcggatgtagcagaggatactgcttcacttgcccaagaagacctggaattcaatgctgacctcaagcgggcggtcgacgaattctggattctcttgcggtccttcggtagcgcagaagagtgggatcggctacaggagaagttccacaatgtcttgcgtcatgcaaacaaagatcccgagtttgatgatctactcggagaggtcggaacttcgttgcaggaaatgctcaccaaccccgagttcttcgactcggcgccgcagaagctcgataaactcaagcaacactctgacaaaataggctcggaaacgggcctgcgaaaagatgtggacgaatttttagcacagaccaagcgcacactgagaaccgtgccggaagacccagccgtctccaagttaatcaacgccacgaagaaggtgtaccacggcgcttggggcgcctataataacaaaaaggccgacctcccagcagacttggtgaacgtcttcctcccagtgctcctccgagcaatccaatatatcccaatcccccgcctagagatctcggctccagaaatggacctcctcctcgagaacctagttcttgaacccggccacacagtaaacttctcctccttcctcccctaccgcatgcatctcctcacgcgcaatgacatcgacgtggtgaaaacccattccaagcgcacagaaacactcatgaaaacagccttcacagtcaccgtccagggcctaaacatcagcgccgaagacttcggctactggttccgcacccacacaggcttcttccacctgaaggacgaaggcatagcaagcttcttcctagaccgccgcggtatcgacatctccctagacattgaagtgggccgcggcaggctggagcagatcttctctttgcgtggagttcgcgtctgtatccacaaactcgactacacggtcaagcgtagcaagtggagattcctcttatggcttaccaagccattgctaaagcacctcgtccggcgtgtgctagagaagaagattgcagaggagattgttgcagcgacatttgcgctgaatcgtgagctagtctttgcccgtgagcggctgcgtgctgcgcgcatcgctaacccgcacgatctggccacgttcgtgcgggctgtcctcgcgcgccttaaacccgctgactcggacgtcgaggctagaattggtcttgagccgctgaataagggtgtctttaggggtgtttatgctcctggaagtattgtcaagacctggaatgaggaggctacaggtgcacaggaggctattgagaatggggatgagacgcatgggcttggtcatacctggcgtaatgatatctttaatgtttccgggcactaattgtgttacttatctgatttaggtgtttgggggagttgctctacttaattacagcgtgtttatgattttatgatgaatccgaactatcaccggatgttaacccgtgctcggtgcttttgttttccgttctaatgctcatctcttgcttccttttgatcacataatactctactaaattaagagtcctaatcgagtctaatattgttgtaggggtagtaaaacatacgggtatcttctacccaggtccttctttgaaaaacactccaatttctctagattgatctcctatttggacgcagtataggtgaccttaggagtaacaccaatgattagggtgagcaaaatataaaaagaccacgagattcggcttttcggctgctccgcaacgaggaaagggattgaaggcttcgaggtagatagcgctacatatttgtcttggccatgtgtaaggacaaattccctttatataactaggaaaaataccagacgttcttaaacagcgatttcgccattcacttacataaagccatcatagatcatacaagctcgggtacctactcatccaatccgaacaataattttagatcctctattatataggaattaactgtgggagacgacaaacaggctgcttgtaggccatattactatccttgctgtcggactcgaagttatccaaaagcaagaaggcatacacatattccagctttgtacatcgatgtatatctatgctgtagataattgagcagcagacaatgtaaccaaataaagctgcaccataaatgaataaaactctcgatgatattcagatgttctctggtcaaaagctagtactcgttcatattgtactcaacatcactcatcgttcattggttgaccacactcacacgtgacacggctaaacattgttcctcttttaggccacctaatgtagatctaagcattggagctgcggagcaaacatctccaatctctaattctttattcgaagaacaccagtgacacgagcgagtgcattctccatgttgattaattaaatattacaacaaatccaccaaacctttagcttgtcgaagcttcacctacctacatacctcggtctacacaaacacaaaagctccacatctctccgagcgcacgagcagctgctcgcgcagctccgctgaaatgcaattattacgactcctggtcacactagctgtagtgctattctcagttgttgtaatcgctgctgaggattactacaaggtgcttggtctcgcgaagtccgcgtcggagagggacatcaagcgcgcatacagaacactaagcaagaaataccaccctgacaagaatccgtgagtggagctactattctcttatctctattttcatgctttcatttctctacgtggctcgcacattacactcgcacaaggcaattgctaaccttcctcgcagcggcgatgacacagcgcgcgaaaaatttgtcgaaatagcagacgcctacgatgtgctttcgaccaccacgctgcgcaaagtgtacgaccaatatggccacgaaggggtggagcagcaccgcaagggcggagcggccggcggcggcggccacgatccattcgatctgttttcgcgattcttcggcgggggtggacactccggtcacgcgcctggacaccgccgcggaccggacatggaagtgcgagcggcgctaccgctgcgggatttctacaatgggcgcgagatcaacttcctcgtggagaagcagcagatttgcgattcgtgtgagggaacgggatccaaggatcgacaggttgtgacttgtgatcggtgcgcagggcgtggtatcgttattcagaaacatatgcttgcgccggggatgttccagcaagtgcagatgcagtgtgacaagtgtcatgggcagggaaagaagattaagaatccttgtcctgtttgtgaggggaatcgggtcgttaggaatcaggttgagactagtgctactattgagccggggatggggaaggggactaggcttgtttttgagaatgaagctgatgagagtccggactggattgctggggatttgattgttgttttggatgagaaagagcccgagcttggagagtcggaggaggagaggacagatgggacgtttttccggcggaaggggaaggatctgttctggaaggagagtctttcgctgcgcgaggcgtggatgggtgactggagtcgcaatcttacgcatcttgatgggcacattgttcgtcttggacgtggtcgtggtgaggtcgtgcagccattggctgtcgagactattgccggggagggcatgccgcattactccgagggtcatttacatgatcaccatgaagagaatgatgaagcgggcaatctgtttattgagtatactgttgtcctgccagatcagatggagagtgggatggagaaggacttccatgctctttgggagaagtggcgcaagaagattggagttgatttggcggaggactctgggcgaccggttgtgcctccgccggcggaggataaggatgagctgtgatgattgcgtttccaagccttgttcatttttgattcccttttctttctatggtcattgtatattgattgcatctgttgatttgcgtgcattttacggctatgggctggattagattagacccttggcttgtattaaaatgttggatatgatatacaatagacacggcctgaaccctacaagctaggggtctgctttttttgatttgaaataaaattggagacaatccaattggaccattggtttgaactttgtcgtcatacgtgactcaatttaaagccaaagttcttctgcggacttctcgcttcaatcgatacacgtggggcgacgaggatactgttcatgccgccttaatgccagatggagatcgacgatctggaagatccggccgggacacagttctatacccaatgcacgagactccagattctgattctacctgacactgtttggtcgcgatgcatacccctcgtatgaggggttttatggcgcaggacgtaaacaaagaaaggcgtacagcgcatagatctatggcgatggtctaactggaataggccttgaatgacaggggtatagaacaggggttggaggttgtagcgaatgagcttagtttacctcggactacacaaattccacttccttgaccgtcatttcatgttcgtgttcaatgtgactgatatcaatgtgtcggatgttcgtttgaaggttcggctaggtgctctctccatgtgcaagcatccacttcgcgggtacaggctctgtttgggctttggagagttggctgttcctatttattgcatcagatttgggttatttcataaaattccttagtctaattccgtgggccccattttatgccctatgtgttgttgctttggggacatcttcaggacgagtttcaataaggaccgaaacatacattgtcccttcactaacacaatagacctaggatctctgattcagtatccatatccccttagtactccatggaaacacgccaaacgggtcagggatgggaataaagtgtaatcaatctgtcaaagtttcgcccgtaaagccaaaagttgaaacgattgagaattctccacaagcctcatcccgccctatgcgaagtaaatatccctaaaaatcagctacaacccgagatttcaacctatcggatggccttacaatataggcaaggatagacacagccacctcgtacgaactacctgaggatctacaaaccttaggtagactagattagactacaacacacagttcgtgcaatctgatagggctagtgaatggtttgccagcatcgtatttcaagctgcagtccctgcctctaacttggtgggtctatatgtaccccgtatgacggttgtcgtatgcgtatgcatcatgcactatctttaatttgggaaaacccactatatgcaatgagactaaatgggggaaatatccaatacatactgtccacgttgaggagaaggtgcctagatgcagctataaacagactttggtgagactgatggatggcacgcggattcggaatctaggccggacagacgcggtttgccttcggatagtgtcatagtacgataggaaatgcaaaggggcgcatacggaagcactagtgacaatgccgtcagaaaaggattggtcaatcacgtcgatatatccaaagtttgatggattcaagtgcgttgtagcaactcttttcgtggagcggcgtgtaccgtgcatagtgcatcaaagaaagctacggatattgcttcaaaagctccagttgtggagctcgtgaaccacggaatcatgttcttcgcccacactgccgtgtgttatctcttttcttaactagtaaaacccaaggggctggctgagggggttcaaacagatatatcggctatagcgggttgcggtgtgggattgtggtgatttacgatctaatataatcatttgatttactatgtcatgcttcaatttagtactttgatagatttacaatttaaagggtatagtacagaatagggttgtgctagctccctaaagtgaaagtagattagatccatcaacttatacccatcttgcctttttgtgaacgattaactgtacagctttgaatagacgaagggtctcactataattatgaatgctgtgtatgttataagtacattttaacccggggctgatctcctgcagaaatacagggaaaatatgctgtaagacggcttaatattccacagaagtttctagggcaaacgggcgaatggtaatctcatatctatagagtcctagtatcaggataaccaatcagcagtgcatattttagcgtttcaacgcaagaaaagagccaaatgccgaatttgatagcgatcgacaaacgttagcctacaggctctggtaacggcaatgcgtagacctagcgtctaggatttgatttgatggccttgcatccaacctattggttcggtagtactctaaggttcgtatatatgtaaccatctatatctggaaatatgtatatacgcccattattggtataggaaactgatggtattcatatgacaatggttcacttaagatagcatcacaaataaatcatacttaccaaaatacatctatgtgtaggccaatcatgcctatagatagcatagatttgcggttcactgggaaaagtatatacaaaggtacatataggaatagcaagcatgaaagcccttgattttccaaatataccaacaagcgtgctatccactattttaatgaacacagctaaaataggaaacccgcgaaatcagtaaaaattcgtacccaccggccagactgccaatctcgggtttccaatggtgctttgagctccctcgtatgccttcattggcgtggttccgcatcgaggttgatatatgaagaggaggtatgggttcttgtttgctatcaaaattctctttcgtctcaatcatcagctatcttatattctcactctatctttacttgatctcttaccccatcagtgttcataccttcttgtttatacttcttcctcatacctcactcttcgtctaccttccatctcttctagacccggacttattgctatattaacgatatcttatctgtatcggaagatgcgtcccctctcgctgaagacaggctccagtggcgatggagccatgccttctgatgctctggaacccatcgctatcattggcctagccacccactttccaaagcaagcaacaaccactgagggtctgtgggagcttctcctacaggcccgctcgacgtggtcatcgatacccaaagaacgcttcaactcagatgccttctatcatccagatcccgagcatggtggaacggtaagtcatacccgagctatgacagaccaacatcaacatgaataatcggttaacagatatctgtctagtttcatgtccaaggaggtcactacctctcagaagaccccgcctacttcgatggctccttcttcaatattaccaagaatgagctcctgacattggatccgcagcagcggctggtactcgaaaatgtctaccacgccttggaaaatgctggcattccattgaccagtgctgttggctctaacacatcggtttttgttagtggattcaaccatgactacctgggtatcctcaattcagacccagaaaccactttgaaatacaaacccaccggtgtcaccaatgccattctgtctaaccgtgtcagttggttctttgacttcaaaggacccagcatgaccattgatacggcttgttctagtagcttggtggcgctgcacctcgctgtacagagcttacgtgccaatgagacaattatggtatgttaccatataccttgtgttgatattgatactatgctgataatatgctgataacgtttaaggctgtcgtcagtggtgtgagcattcttgaaaaccccgcggaaaccatcggcatgagtcaccatggtttgttgggacctcaagggcgatctttcagcttcgactcccgtgccgaaggctatgcgcgaggcgaaggcgtgggcacagttgtagtgaagcctttgagtgtcgctatcagagatggagataccatccgtgcggtcattcgagagacgggagtcaaccaggatggccgcacgccagggatcacagttcccagcgcagatgcccaagaaagactaatccgtgaggtctactggagagccggcctggacctcgaacacacaagatttgttgaagcccatggcactggaacaagcaccggtgaccctatcgaagcgggcgctcttgcaagagcattcaaatgtcgccgagagactccgctttacgtcggggcgatcaaatcttccattgggcatctggaaggtggctcaggtgtggcaagcctcatcaaatctattctaatacttgagtctgggattatacctgcaaactttgatatgaagcagacaaattcctctattcctgcaactgagtacgatattgcattccctaccgaggctcttccatggccatctccgggcctgcgaagagtgtcagtcaactcatttggaattggtggcaccaatgctcactgcatccttgatgacgcctaccactatctgaatgaccaccgccttacaggcgcccaccgcaccacatccactgttcctacaacacagaaaatcaacagccggctcttggccctgtgtcgaacaggaacggaatcaaaccatttcgtgacggattcattcgatgacagcgatcactctggacatggtaatacctttatggacacacccacaagcgatggcttttgtgaatcaccaacattcgcatcatccacatacactagcttgatcgaaaaaccaaagctgttcttactctcggcttttgacgaagatggcgtcaagcggaacgcagctgaattagccaagtacttgaaccgaagaatgatgaagtcagtcctccatgactatctccttgatgacctgtccttcaccctgtcgaagaaacgatcccattttccctggaggagcttcgtcatggcatcctcagtcaaagaactcgcatggaacctgtcagaagcgaattttgccaagccaattagaactgccagagttccggaggttgaatttgttttcactggccaaggagctcagtatcaggctatgggccgagagctcatggtctatcctgtatttcaagagtccgtggaggaagcatcggactatatccggcggctcggtagtccgtggtcgctacttggtaatcattttcttgcctcttttgtctaatgtgcttgactaacgtatcacagacgaactcttgactgaaagacagtcaccccgagtcaacttgcctgagatagctcatccgctgtgcacagtcttgcaaattgcgctcgtggatctcctggccagttggggaatcttcccaaaacgtgtaacgggtcactcatccggcgagatagccgccgcttactgctctggcaagctatcccgcgaaggttcttggaaggttgcatactatcgtggatacgtatcatccaaacagctttccgcaaatggagctatgatggccgtgggcctggatgcatcgcaactgcaaccttatctggactctgtgaggaaggacaacgccggggagctcatcatcgcctgccgcaacagtcccaaaaacaacaccgtttctggagacgaagctatgatcgactgcctcaagagtcttctcgatgctgatgccatctttgctcgaaagttgaacgtcaagaatgcttatcactcggcccacatgcatgcgatcgctcaggattaccttagtctaatgggaatgctttcttttggtaggcggctggcagctccacatcaagtgcatatgttttccaccgtcacaggacaacaagtccaagaggaacatctgcctgcacaatactgggtggacaatatggtttctcctgttcttttcacaagcgggttggttgcaatgacctcaaaccaaatttccagtcatgactcgattgattccacggattctctgcgccttatcgtggaaatagggcctcacacaacccttcagagtgccatcaaagagacattggcctcgaagagccccaagttggaatttaagtacctagccgttctcaaacggacagatcacagcctcaacactctactaactacagtcggcttcctaggttcaagtggatgtgaaatagatcttcatgctgtgaaccaaggttcttgcttcaaggcaagaagacggcccagactgttggtggacctgccgccatacagcttcaaacataccgagaagattttatttgagtctcgactgagcaagaatctgcgaactcgaaagttccctcgtcatgacctcttcggtgcacctatcacggattggaatcctacagccccaagatggagacattttgtccgattgaacgaaaacccttggttaagggatcatgtggtaagttcgaagttgtctccaaaatagcctcactcattgacacagcctaggtcactggaaactatgtctatcctggtgtgggttatttgatcatggcaattgaagcatcgaggcagttggtcagcgaggcaaagatcattggtttccaactacgaaaagtcaacatccgaagagccttgattgtacccgataccaaagaaggaattgaggtttccttggcaatggcaactatcgaagactcgtcatcgtcgcgaacgtggaggcgattccagataacttcctacaatgcatcgagcgaccagtggacagaacattgcactggttacatcaccgtcgaccacgaaacagctttcgatccaattgacaatggccgcgaagcagaagaagaaagccgagcattagaatccgaacttttccgcgcaaatgagacatgcgcaaaatccatggctttcaaatccacatacaacaacctccaaacatccggcctcaattttggtcctttgttccgaaacctcggagacgttcgcgcaagtgcctgtggacttggtaaggttgttggatcagttacagtcccggacattgcacagtctatgccaaagcagtatctacattctcatctcatccaccctgccacaatggacagcatgatccacttgatgatcgcggctgttctcgactttaccggaaagtccaccctggatcagatcagattgccgactttcatacgcaatgtctgggtatcagcagatttgaattcagccccagcccacaaattcacaggacatgcaaccgtgtctatggtgggatctgataaatttgagggccaaattcaaatgctggatgaggaaacaaacacacttcgcatccgcatggacggtattgagctcactccactggagtctggtcttgctgaaagtagtgagcgaaaattgtgcagcgcaattgaattcaagcccgacctccatttcatcgactcaaaatcggcctgtgcactaacttctctcaatgctaccgatgacactgaggctttgtactgggtaaagcgtcttcagcttgcaacgatgctctacgtcatggatgcactggacgagctcaaggatattgatgccatgaaactcgatttgcacatgcgaagattctttgactggatggagcatatgcaaggattgctcgagcgcaatgaaataatacatctgccctacagtgaattccaatgcgcttttcaagacgaggctctcaaggaagccattggcaaggaaatcgaggcccacagcgccgaaggcgccatcacagcccgaatgggccgcaatattgctcaagtcgtgcgccaggagattgatcctctgcatctcatgtttggtcaagacgctgtgatggaacaggtgtacaaggaaggccttcacttgtataacctgccgcagcatctacagagccacttgtctctcctccggcaccagcattccgagctgaacattctcgagattggtggtggcaccggcagcttcactgctgaagtcttggccgtcctttctccagaccttgcgaagaacaaaggaagcattgccagttacacattcaccgacatttcatccggcttcttcgagaaagcaaaacagcgtttccaagcatggtccgacatcatgaacttccaatcgctcaatatcgagcgaagccctgtcgatcagggacttcagctagggacatatgacttaatattcgctggcaatgtcatccacgctactgcaaacttgcagaacgcattgcagaacctgcgatctctattgaagccgggtggtcagctcatcatgcaggaagggatccgacaggacttcctgtggtacccacttgttttcggtcagcttccagggtggtggctaggcgatgagccatgtcgccagtggtgtccctacatcccggctgaagaatggaatcctgtgctgctgaaagcgggattctcaggaattgatgtcgagtatcccagttcgaacgatccagatttgacatggcagagtattctggtttcttctgccatcgaaacacccaaggagaagtcatctaatactgcggttatcttgacgttcggtacattgagatccgaacaagtcattaaagacctccaaggtcttctgccggaattgggatacacgaatatccttattaaggagcctgcagatgtgaaaaattatatcctgcctgatgcacttttcgtgtcattgatggacttggagtctccttacctgttcgatatggacgaagcggaataccacacactcaagaagatgctcagcgagtgccaaaatctactgtgggtgacatgcaatcctctcatacagccacacgcaagtatgagcattggtcttctccgaacagtgcgctgggagcgggatgccgatggctcaaatatcgtcaccctgacagaggcggagcctgacatcacttcgccaaagagccttgctacagctatcggcaagattgtccagcggcaatttgtggacaacccggagaatgatcgccacgccgagtacatgttgcagaatggtctcatacacattggccgtttgaacgagtgggaggcggcagatcagtttcttgctgcacaatcctctcagcaagctcctcctcaacttcaacgcctcggtgattatgatcatcccattgagttgcaggagactgctgttagcaccagcgaataccactggattatagataaggaacatgagacaccgcaaaaagacaccgaggtcgagattgagattcgagcaattggtctctcttcgaatgtttatgccgaccgcctcgcgaatgaggttgctggtgttgtgaccaaggttgggcctgaagtcgaaggcccggccccgggtgacagagtcatttacatctcaggcgacaaaaagggtggttgtatccgaacacatggtcgagctgaccaaatgcagctcgtgaagatccccgatgagatttcattcgaagtcgcggccggtttggcttgggcatacgcgacagcaatccaaggactcggggagatagctcatctggcacccgagaacactatcctgatccataccagtgtaacggatatcagtcaagcggccattcaatatgcccagatgatcggagctacaatctacgctactgtagcaaccgtcgaggaacgtgatttgctggtctctaactacggtatatcccaagaccgtatcttttccaggagggatctgagcttcatcaagggtattatgcggtgcacaaacaatactggggttgacgtcgtcttcaacgcactgagcggcgaggcactccgggggtcaacggcatgcctcgctccatttggggcatttgttcatgtgtcgaatctagatctgcgagctgatactacaattgagctagcctctttacctcgcaatgtgagcgtctacaccgtcgacattcctttactggctcaacatcgaccaaaatcggttcgtcttctgctcatcgaggcactgagactgtactccgcaaaaaagatcggtcaactccacacaactgtcatggactttactcggatcaaagagggtattcaaactgcgcatagcggagaagcagcaaaagttgtgattacacctgatccgtccaacatggtccctatggtcccacgacctctccagccttgtcactttgacccacgcgcctcgtacgttcttgccggtggctacggcggcttaggccgaagtttagcacgatgtatggcatctcgtggtgcaaagagcctgattatcctatctcgctcatcagcttcaagctcagagaaaatggaattgattgccgatctcgatagaatgggatgcaaggtccattcactgatctgcgatgtggccgatctctctaacctccaacaattgtccagagcagccttttctaacttaccggctatcaaaggatgcatccaagcatccatggtcctgcgggtaagtccccggtcctcactcctcggtactaaatatacacaaactaacatattcgtaggatggcgccttcgccggactctctttcgatgactggaaagcagccattagacccaaagtccaaggttcctggaacctgcacacagtcctaccggacagcatggacttcttcattatgctctcctcagtcgcaggcatcttcggcaaccgcgggcagtcaaattacgccgcaggcaataccttccaagacgcacttgccgcataccgtgtttcgaaaggcatgcatgcagctagcatcaacctaggcagtgtatcgaacgtgggctgggtagccgagaaccgaaactcgatgcgcacgcacacagccacgttattcgagcttctgcgcgaagaagaggtccacgcaacggttgacttccttatccgcgatcagcaagacggcggaaatgcatcaccgcgctcacagctcatcctcggtctgccgaccgcggagatgtgtcgccagaacggagtgcctttacctacgtacctgaattactcgatgttcacgcacttccgtaacacggcgacagcgaagagcagtgaggtgtctctgcagaagactgtcagcactgctgcgcttttgtcggcggcttctggcttcgagagtgctgtcgttgttgtgtcggatgggattgttgagagacttgcttcgctgcttgccattccttgttccgaactcgatgcacagcgctttagctttggcggcattgactcccttgttgctatggagtttcgcgcgtggatcatcaaggagcttaaggctgaggtttctttgcttgatattatgggagcggagaatattagggctttgagtgaaaagattgccggcaggagtcgtttaattggagggtctggtgcttaattttccgcgtggtttacttatctttctttttttttacgaatcttctggggattatctttcgatactgattagcgttgagctctcgtggtttattgatttcacgtctgatgccccgttacgagatatgatcattctgcatctttctcttaggacattttccaatctctttttggttcatacactttaagactagattcactaacagaatgcctatgagcatttctacacagtttacatcggaaaagatttaaagatttgataaatgcgatacttcaattttgtccacctgagtcactctttgcgaatccatttcgacttattaatagtaggaatatgccatgcttgcattaaagaaaaatagctcatcgaaaccctaaactttccatccgttattcattatattcgtcaacacctaccgtgcagacccggaggggaaataaccccgtaagccctgtccaggaaatgtacaaacagccaacttgggctcagccccggatcgctcatgatgccacgcacgctcacgtaaggccaaataaaccgagcggaacggctggaggtcgccaggtagtcgagcaggcggtttacgaggatcgaagcccagctgctgaagttgcgcctcacaccaatgcagggtgtccgccggtagatattgctctgtgtcgtagtcggtgtgattctgttgcatggcctgcagcgtcgcgatgtcggctgcgaggccaaagttctctacgcccttgggcgggtggtggtagttcatatagggttttccaggggcgcgctctggatggtctgcttgtttgcgaatgttgtggatgttccaagtttggacgtatgatttgatatgggagcggagagtgggcatgtagattgcgaagagggcaacctgttcagggattaatgttgatgagaagaggccttcgttgtgaagttcgcggaaatagttctagttgaggtcagtattctgcgaataggtgtaggataaacctgccaaagttgactaacatgatatagtgttactactgatttagcaagctgggcccaccaagattcaatccggtgggtatctgtggcacgtccgggcgcgcagcattgctcacgcaggacctccggctcagtgacgcgacggagtgcaaagtgagcatcggctaaaaggggaacctcagactcgaggtcagatcgaagagtccgtggttggcgatttttagaagcaacagtctcaagatggtttttgaggacacccacggccgtgtgcgcatccacgccaacatgaatccagagaacatatcgagaataagaatcgagctcagcaaaaatgcggaacccgaaattggccagctttgagtacccattcacgtgccaggtcagattaggcccggctagaatctttggcgggggaggacgccggggcacatcactggtgcggcgttcaactgtatccgggcgcagcatgcggtagacactatagagacgatcgcgggcaaatacatgccccttgcttcggaagtggttgtgcaatagttcctttccgtacccctcaatggtccccttgtccatttcctcggtcagggcgtcgaggatctcctgaacctgtgcttgttgttgtgcaggcgagtcgaggcggagacggatgccgagctggtgacgaagtctgcggagtgtgcggtgggagacctcataaccctcatcgtgtagaacggtgacgatctcttggtcggacaagcccacgtcgaagaaaagatttttgatgcgggcatgaagcgcttcattggaggagttgttctccatctttttcttgacgccccatagctgtaggcgtttggtcagagtacgcgacgaaatttgaatatcatgctgcctcttcaggtgcttgcaaatgtcgtcacctttcattttcttttcgaacaggccgatgatttcggctttgtacggctcaagatccacccgaggacgacctgacattttacttggcgtatcaactggattctccattttgcgaattcagaccaactaatgttgataagaattagcctggagaagatgttcgtggctggggaaatgcgggcggtgtgctgagacctaccggcagaaatcgaccgccttgatttttttgttatcgcagcggttcttctcgagaaacaacgtcctcgctctgctcagtcattctcgatatatttttcggtttaatcttgtactactgatacgggctttacaatggtccgtgaactcaagcaccatgagaagaagtacgtccgcacctataattaattacccgcgcagaaatctcaatccgatcccatccaacattttgaaagcttcaagataccacaaaagatcaaaagctaacactgaaacccctgcagacttctccggaaggtcgacttccacaactacaagtcagatggcaatcaccgcgaacatgaaattcggcaacgataccttctccaagacccaatggactaccgcaaatacaacgcgctctgcggttctctgcgtcagctagcacacaagctctcccaactagacccggacgcggacccgctgcgcaagaagctcgaatccgagttgctggagaagctatggcggatgggaatcctgaagcagtcccgcgagcagggcgccggtttgtccaaggttgagcgcgatgttacagtttccgcattgtgccgtcgtagattggctgtcttcatggtgcgctctggcatggttgagactatcaaggctgtaagttgcgtggggatttggtttggggtggattttatgctgacgattgtttcgctaggctactactttcatcgagcagggccatgtccgtgtcggtacggaggtcgtcaatgatcctgcttttttggttacccgcaacatggaggacttcgtcacctgggttgattccagtaagatcaagcgcaacatcttgcgttaccgtgagaagctggatgactttgatcttctatgatctgccccgttaaaaaagcattttgggtttttgttctgatatacccggcgcttgtgcattgtggcctgtttaggtttggcgtattgatgtttcatgaaatgatatctcatgtccaaagttctctggataactcaatatggatatgaatactacctatgttctcgagaaacgtagagacctgcaagcgcttattgtgtcgttcaccgaaggtgctcgccttctattccccgagctaccaggatttgatattgaaggttatatgatggctccacgtcactttcgcatcgttgcccatgctatgcaaatgcgataactaatctttttgctctcttgctatcagttcacatccatctacggagtacgcaggtgggaaaccaccattttgaggtagacttgggcccaatccgagtcttcatcttcttgcccacatcatctctaatcccagattccggaaggaaaataaatgtctgtacttccacgattcaggcgttgttcgacttaacgtatactactttcacaatatttccttcgcttgaggcatttgaggtctattgcgatacacgggacggcgaatctcgagtctggcacgacgttaataatgttgacacagacacagaatatggctattgagtcagatcgtatgttgattggtttacgcggccggatttgagcttgtgtggttttctatgcagaaaagcaactctgaacctcgttttcagaagttacatcaggttggttttctcgcttttaccgcatcgagagcaactctcaattccattatcatcaccatcatctctcactctgttcctcggtcaccgattacctattctcgtggacactctattcatgcataatgaacaaagggcaagtggcagggtgctcaggtgatgatcggtgacgcttaggtagtagcaaagcaggattatctaggtaatgagcagttacctttgaaagtcagggtactcaggtgcacaattttactcggtcgagagacgataagagcagcactagatcaaaaggagcaatgtttccagtactagacattatctgttacataagtaccgtataaggctatgtacagtgttccaataataataggggtatatcagtcttcaaaaaataacatgagcaacgcaaggaatgcaaaagggactggaattcaaaataggccagaggctcccgcgaagaaagaaggttgaacggcgggatgggaaccactggatgcaaatgcagatcatcactcggtgatcatggtatcatagggaaagcagctgaggcagggtatgtttgtgagcagcacctgtgcaaggctctgtgggggtaacaagggagtagtgatggttgaatttaggcattaggaagaggagaagacttcgaacgaagacatgtccaacgtcttcgagctccatcaggtgaatttgaattcaagctggtttttcccaagagctccaagagctgggcctgcggatttccttgagaatccgattccggctcttcatcttcggggatatccatacggaaccgacgcacgctgccttcgcgctcagtcttgccttcctcgaagaacggggtgcgcgagtcgcgggactggaagcagcgaggcgcgacgcggcgccagagaccccggacaccactgctcgcacggtcaatcttttcatattcacgccgccgggtatctggtgaggtccattccattactgtcgccgggacgtggatggacgaggacgatgggctgcggtggtgactgctgggtaaggtgtttgatcgatctcttggtgtgatgaagtggggtgcgctcgtcgagtttggtgaagtggactctatcccgaagcggatgctggaatatgaatgtctgactggagacgacggttccgagctgcctttctctgttgatatgcggctctcgcgttgaggcctgtacgtagctgatgctgtccggtatagagaaagtcttgtctcggtcgagggtctgttcgattcatcttgaaacagacgacatgactcccggtgtaacgctatcagtgactcgcgcttatcctgaatggaactgcgagctgaggtgacaggcacgatggcggcgttgggcacagctcggcgcgaatgcaaggaactgcggcggctgtttggtcgcgatcgcacagtgctgcgggatgccgagcgggagtgactgatcgaagtagatgtcgatgctcgtgattcttgacgaccgagctcgtttcccggtggatcgatccttttcaccttggccatctcagatggggacttgggcgagtcacatcccttgagctctgtgacagtggactcgcacttagaaatagacagagatggctgcagggccaggcatgtgacggaggtcatttcccgtcgggaaacttctgatcatatgcaaatataggcaggtgccctgattgctcagatgtatacatgtatcgaggggaagttcatgtggataagattagggttaatatatatttaaaggagaacacgactgcatctagaacataaaagagaagcaaaatggaactcgacaagcgaacctctttccttttattaatccaacatgcgcacaccgctcctcaactattttagcggagtgggggggcgtctaaagatcgtcgctatgagggcgtctagccagttacttgcagttacaaatgcaggggctttattgcgggagagtatgggggaggggtaggctacggttttttatagtcgcagtgctaacaatatatatagatagtaagtctatataaaggaagacagactattcacaacatggtcgcattgctaatctaggaaccctgtttgcacgattatagtattcggtcaataatcgaggccatattaaatataccaactgcactaactgcactagttaactgcactaactgccctaattaaggagaactactccgtacactaacctatgatagacatcgcatcctgcatgcgtgttgggacaccgccagaccccctagtttcaacaagatctacaaaagacggagaataaatagtatatactttgaagagaatgcaataaaaacttgaaagcgattgtctagaatcatctttgactttgtttaaagagaataaaggaactcggggttctcccgatctgtcaaatcaaggaatctgcagccaaagttagcagaagttggcaaacgttaactaataaatcactcactcttggttctctagtctcacatattctgggtgagcaatgaaaaggatcttcttctggttctcacgacgataccacatccagaccccgaccagcaggaataaacacacgccccaacagacgataatggtcacctcggcggggacatagcggggagcgtccttcgggcggaaggtttgtggacctggaaattgtgttagcgtgtgctcgccacgttttgacccctgtcttctcctgattttcttaccgatgatatttccaacgcaatatccaatcagatacaaagcagccacggtagtcttcttggtatatcccgcgacattggaagaaatcagcgatagcaatgccacgaaaggggtcggactggcttgtgtgaggtaatagccaatcaaacgaccgacattgttagataggggcagagcgacaatgagcagcatccctacgattgcagcgactaacccacccaaactggcgaggatgcgctgcccggtgatctgtccgacatagccgttgattaatagtgcaacgatttccactgcgccgccggggacacccagaatcagactctccttcgcgttatatccgaagcttgtaatctggactggtcagcatgcttggaatcttcaggtctttataagctattatcaacataccaactgactgaagaaattggaaatacccccatttggaatatcggcaatcaaggcataaaagaagaaagcccaggtcatcggatccaaaagcgcctccttgacctgatatagcttgaagtgcttattaccaatgccttgttggttgacccgcacgcgggcaacagccaagatgcgatcttcttcatttaaccagcgtgcattgagttggttatctggcacaatccagaggaataccagtcccaggcagatggtgaggagaccagtgacgaggaaaataatcttccatggctcgatggccgacccgtgtttctcggcaccgacggcgatgccgtaggcgattactccgccgagaatttggccgacgccgttgaagctgaaccagatgttgacgcggctgccttgttctttttttgtgtaccactgtttgggactgtgttagctcgactcattgtgtctaggttatagcctgtaggaacagagatggattttgtacctgggaggttaaaagtgcaaagcccggcgtcacagctgcttcaaatacaccgagcataaagcgaatggcgatagcaccggagtaattgttgacagcggcaaaacagctgagaatcattccccagatcaagatgcaggctgccgagtatttccctagtggaaggcgctggaggaggcggttggtcgggtattcccaggcgagataacctacgcaggagagctattaggtttgaagctcccagggaagagtcaattcgagagcatagatagaacataccaaagtagaacaaactcccgagccactgatactggtctccctcgagattcaaatccttcttaagacccataacgctggcataggagagagtggtttctacacatcagatcacagattaacacttcggattgaataaacagccaacagaacaaagcataaaaccaagactgctctttgctgtaggaaacaaaatcgaggaaagatatgcacatactatccagataattcatgccatagataaagcacatgatgggcatcatatgccaatcgatgatttttaacaagcggcgattcgtagcttcatccagctcgatagtttcaccgtgaagattgccaagggctttcatagcctcatcggcgtcgtgtgcatgcttctctatcgtggggtcgacatgttttatgttgcccatgtccatgccggtgtccacgctagaggaaattccgatagctttttcctctgaggccatggtgtcggttctatggggtaggtcgtaaagggacggggcagtagagtaattcagatcaagtaggtcagacagacaaatcttaggcccttcgtgagttgactgtagtacaactataagcaataccaaggcaatgtataaaaagatcaaggaacaccaccgggcgggcacagctaaataacatataacagaataacggtcaaaactccgcaggtccgatagctatacaggacgatcttagtacgtaacattaaataggttaatataccctgtactccgtgcgctgtacctctgagcaaagccgggtagctctgcccaggccgttatctcaagagtctcctcgaacgattcatcctatcacacaacgcagcacatgaggcacggcaaataacttgtgggcctctccacgataagaagccgatttatctggggttggcggtttgatgatgtgtctcattggatggccaagagaggggagggggatgatcggcacggaactgccatggtctgttggctgcggcgttatggttatttatcaatgcaacatagggaaggcaatgcggattattgcggagcgaagtagacgttacttacttggtgtgtatatgcggggatgcacacacatgtagtaagaatacgtcaagagaaaggtcgctagttacaatgtacaatgtatagattcctagttccgagtgaattccgatgaagtttaagcaaaagtacgtgttcttatctattgttccaagtggatttggaaaacgtctccttatcaaagttactccagaattcggatattcagagacttgcttttgatcttcatcgcagacggtgtgaaacatgctgatgagcactcgcatgtcttagacttaaccttgcccttgcatcctctgggcgtgcaggaaagcccttccgtagccggagaggctccagggctcgtgagcaatgatgtaagaaagcatcaagttgcaaaaaggttatatagcacgtcatcaaatatagaattttcattatgtatgtacatacagtggaacgtggactgcacactctattgcgcacccacacgggccagatacgcctcccagccctgctgctggtactgtttaacagcttcaacagggtccgcagcggcatagataccacgaccagagataatgaagtcggcaccgcggccaatagccgattgcggtgtctggtactgctggccaagcttatcgcctttagacgagaggttgacgccagtggtgaagacgacaaagtcctcgtcctgcgcgggcgcctccgtagactcgacctcgcccagcgaccgggtcgagacaaagccgagtacaaagctggggtacttgcgcgcgatatcgacagaggcggaggtgtaggcgcctgttgcgagggatcccttcgaggtcatctcggcgaggatgaggaggccgcgctcagagccgtaggggaaatcagtagcctgggcagtttgcgcgagggcatcgactatgccctcgccgggtaggatggagcagttgattatgtgggcccattcggagatacggagggtgccgttgtggtactgtttctggacagtgttgccgatgtcgatgaatttgcggtcttcgaagatgaggaagttgtgtttttgggctagggcattcaggccgtcgattgttgcttggctgaagtcggagaggatgtcaatgtgtgtttttatgacggcgatgtagggaccaagacctgtgaatgggttagtaggctgtttcgtcggaggggtggtggctgggtttacttacggtcggcgaggtccaggagctcctttgttgtggtcacatcagcggagacggtaacattgctcttcttttcttccgcgacttggaaaagcttgcgtgcgaggggattggggtgcgattgggcgcggacgctataggtcaattgcgacttggacgacatggcggggttggcggggtgggttgatatgtatttgtatgtgattttgaggttcaaacgataagtgaatcaaattgaaactggctgataaatgcctttagaatacaattctcttttttgaggtccgaaagcagaataatagaagcgaagttcaagtcgaagaccttcggggaactttttctgccacggtggacccacgggccaaaccttcccggaggctggaactgtggcgcataatacgcatttgacatagaaatacatagcacatcttcgcttcaagcgcttagaaagaaagcaatggccatccaacaccgtagacactcaatccgaagagggcaccctgcacaagccagaagaacccgcccatcatacggcccttaccctgcggtttgcccgagtacacatagccgtagaggaacagagcccggaagaaaacccacagagcgcccagaccagcagcccactcaggatatttcagaccagagaccaggatgaagagcattgtctgcgaagaattctcgaggaagttggtgtgggcgcgttgagcgcagttgaacttctcagctttggcctataactagttaagtaggtgccataagaagtgtataggttcctattggatacgggcttgcggaggctgggtatagatgggaatgagacgcacgttttccttgcatagctccatggaggcatagctgtgggggtagggcaccttggcctccttgcgcaggctgccagtaatattgccgtgaacgaagcccaacagagggatggcgccgagtgcgacagcaatcacggcgctgagtatcattagcttctgttcaacgaagcatgaaagttaagctagaagaacctacccgtagttgccaggaacaatgaatgcgaccatgatgagaagagaatttggggaaatgatgcgatatggtggctctccgttatgattgtgtttgattgattacatgtatggagctcctttatacttaattggaggctcgggggtaacaagctccgagctcccgtcggtggaatcaatttgtccgttccgcccagtcatctactccgtaactatggatgaatgatggatacgagtgagatctcgccggcctacggccgtcgagatagccgttgcaaagcaaagcgactgattccaacttctagtgctgcgcaaggctcccctcttactgacttattggcttcacagcgactgcttttgtcataattctaggagaaaacttggccacgtgacacgtacgtacgtacgtacgaccttctgatttataattgcttcgcttcgctccgcaatcattgatgggtaatcattgatgacctccctattggttgatcatgcaattcatagcaatgagagggcaaataaccaatctcatgttcttgtgcaagggaagcttgtctagctttcacaaataaatgttcaaagactgctataagttccgactcccagtatatatcaggagtaatacgatacacaaaatgtccgctaaatgctggatgtcaaagttcatgttcccacgttcgataccatcctacttacactcccgtacttggcttgccaagcgaagaagtataggagcgctcccagcggttgtccgactagacaaaagctgacccaaaagatgcagttcccaatgaccctgccttcaggcccgcgcatattttccaatggtgcggtgaggctaatcaacggcagctggaacatcatcccaaagaacgcgacacctggacttgattagcccctaagctgtggctagagagtgaaagacataacataccgatgaaattgtgtgtcggaatgcccacgagcatttcgtgaagaatcgcggagatagtgaaaaccattccactcgcagctagaggactccatccgcgacccaccagtggcgagtagacatgtctcttcatgaacaggtagacaggccggttccaagatcgccaatacatacccagactagagctgttccaccaatcagtgtagaattcgcggtcaccaaaccgcatgacctcggccaaagcgttcaaaagcgattggaacaatgcaaagaagccagcaagccaaataatcagcgagatagtggatagtttcatgacccgctccaagatagaggcaatatccattactgcgatcttgtcaattgagttgagcaacaccggtgtggcatactgcgcagacagaagccaaatgaacactgccaggcccacgaactccgcaaggcgctttgcaacaaatgaccaccggatggatgctgtgcgcggataaacaggctgatacaccagcgtcggcgccagccaaaagtacgccaggttattgatggtaatattcctagggtaagggcacgaggagtagatttcgggcaagcccgggtctgcggagggattgagtagagcgaggcgaaggtctcggtttgtgaaggcataagagcagttcttcaaccacacgatgatcgcgtgcagctcgcatattgtcccaatgcctgggtggtggatgtaaaaatacaccacaaagctagtcactgtgaggcacagggtggcattgagcgtgtgcaggaaagcagtgtacggccaggtcgactggaagaccttctgatcgtgctctttctctttctctgtctttttctgacggcccactgttcgcttagccgcagtagcggctgagagctcgatgatgtatgccacaagcaaatgacacggaaccgaggcaaacaatatagaccccagaacaacgtcttgcctgcggtagtcgtggcatttaatacaaattagcacgccatactgaatacttattagctggcaattcgacacagtgagcatttggattacccactttcatgaagttctcaataaccaatcgcaggttcattgccactgtcgaaacattagccgtttccatatacaattccctagcgatccttaccgagtaccaacaccataagatttcgaaaacctaggaagttgggaagcacgtcggcctcccgactgaggctggaatgacgagcttctgagtggtatgcagctacatggcgatatttacttcgtttccttgtagttgatgttgatggcggagagacctcggtttcattctgaatagccccgttcgtcgaattgagctgcgattcctcgcgagcgcttttaactgacccagtgcgagtagccattttaacagctctgcgatctcggtactgtgagagattgaagggtcttcaagtcgagctccgattaaaccggagcaccgacggagagcaatgcggagattacaacaacaaccaggccgcacaattacggcaaataggaaaagaagaaaaggagaagaaggagaagacaaaagacagaaattagaaataagatgatttaatactgggcatggcgggggacgagacatcatagcgcaagcttgcagataaaacttgcaggggccaatcagcgtcacatgcgctcaagggacggatcctgcactccgaagagcttcgactctctccgcatctattgctctttttagccctgaaccggtccgattcagtattcgatcagtattttaaactccaattgcctgcgatcctcatgtttgcgaatcgacagccttgatcccgtacaacttttcgaccggtcgcgatggcctactacgaggacaatggaggtgacggcccagggcggtttggcaagaatttcgacggtccagtcggacctcgtagaccacgtatgtttgcttgctttaaggttactttgactgagcttctgcttgttcatatcccgactgacaaccgttactcttaccctcaggtctcgtcacggattatggctcttcgatggtacaatggatgcgaacacggcaaccgagatacaaaggaggacatcgattggagacggaacgaccgagtcccagcttcgcggtcgatgtatgtgttgcttgatctgttctggtctggcgagcaaagaaactgacatgcgacaggttcttcccccgatggcgcggccctattctgctgtcgatacaatccccgtccgacaccttcaccagtcaatcggaaaatcaaagaagcccattgtcgtggtgcgatggactccagagggaaggcggctgttgaccggcggtcatacgggagagtttatgctttggaatggaacggcgttcaatttcgagaccgttatggatgtgcgtatctacagcttttgcggattgcgccctcactaatctgagatgttgtctccggtgcaggcacactacgatcaaatacaagctggtgtcacgtccttggcatgggcccatagtcaggactggctagtctctgggggacaaagaggtgatatcaaatactggcgacctaacttcaacaacgtggagactatcgatgacgcgcaccacgatgcagtccgcgatctggcctgggcacccagtgataccaaattcctttcagcgtcagatgatacaaccctcaaaatctttgactttgcaacccgaacggccgacgcgacactgaccggacacaactgggatgtcaagtcttgcgactggcacccgaccaagggtctaattgtttctggatcgaaggaccaccaggtcaagttctgggatccgcgcactggccgctgcttaacgacactccacagccacaagaacaccgtcacatcgacgcgattctcgcgtgtgaacagtaacctccttgctacttcgtcgcgagaccagactgcgagggtattcgatttgaggatgatgcgtgatatttgcattctgcgaggccatgacaagccagtttcttctctcacatggcatccgattcacagtaaccttatctcgactggtgccgaggatggctctctctatcattatctacttgatgagccacacctgccggctggccagattcccaccgtggcgccgtacgacagcccggacccggcgaatactccgccgcaagtgatctatccggcacatcgggtacagtatgcgcatggtgctacaatttggtcgctagattggcatccactgggtcatatattggcttctgggtctaaggataatttcactcgattctggtcgcggactcggcctggcgagactagctatatgaaagaccgattccacatcggcgaagaggccgcagaagcccagggaacatggaatcgcgggtttggccggaaacaaatgcgcgaggacgaggagcaagaaatgcaggatgaagccgacgggctcgtcgatcaacgaccaggtggccctgctctgccgggtattcaaagtgcgccgtcggccgtccctcagcccgatcttccagggttgctacctggtattggcagtgctcagcctcggcagccaggaacggatggcggcgctatgggtgggatggatccgggccgtttggctgcactcatgtccactcaccctccatcgcagtcgagtacccccacacctggaatgcatgggttccccatgccgcagggtataatcggaacacagccgatgaatatggatctagcacaattacaaaagcaactccagggtttccctatgccacagaatctcaaccttcaagctttggcaaacaaccctggcttccctggtggatttggtggcctgcctggtttgcaaggcggtggtatgcccgatggaaatcggagacagtgatgaaaatggacatctgatttgaaatgcacgttgaatcggcttggcattggcgcaaaggacatagcatggctactttgatgcggggtgacggcgttatttaagatatcaaacaccatttgtatcataggaaattttcgggcatttcgaagcctcctggatccttgttgatgagactgtttgcgtaggtctaggttggctgggcataaacctgtagctgccgtccacgtaggtagacacggtagacaattgttatatccggcacatccggcacagtagtatggtcgagtagtagcagccggtataccattcaaaggccaccttgcatagggaagctggtgacaataagaaccatcacattgacaccgccccatatcatcggtagccaagttgacatcctgaaattgcctgcctcatacaccgcgccgaggctatccaccgtagaagcgttagctacctaatcattcgggaggccaagtgtcaagcaaccaacttacacaactccaattatactcccggctagaagcgactcaagcgctgcaataaagatgtacaccaacggcacaatccatatcacattccagttacggaaatgggtcagtactgcgcacccagcaacagtgagatgtgtcgctccgtagaatatcagcgtccagaaaagtgtgaagcgccagatgtccttcgtgtagtataggtagtatgcttgatgatgatgcgccggcaggggatcgtacaatgacggaaaggaaggcacttcgtagttaatcgggacgcgattgttggccatggagaaatagctgcgccgtttcagcaatcaatcatcaaagcatgacacgtgagcaggggacagtcactttgaccatatgtgttgctagcgtatcaacaaaaaccgcatgtctaagagactctcggagatgacgatgcttgtttgcactgtttagctccatatcattggtcagcctttcgtggtggatgccccccgtatttagctctggacccggacctcggcttcatctcacccattgagagatgtagagactcttgtctgggagcatccctatcacctccagtgttgaaatggccacggaaagatcattagctacgctgctacggtcgctgcaggcgacttccagcttccaagatgccgcttcgtaagagccaaataccccaatgaggtcaatattagactaacaacaggccaattctcagtctgcttcccacggctaccagtttcctttcaatgttagggaatcctctgaacctgacactcctttcctcacaactcctcactgcaccttcgctctggagccaccccgtcgacctccaatcatgtcgcaagatccttagcgtcttcaataccgccgccatcgccgtcttgcagaatgatactaccgacgaaccccggattccgtacgggcggaatagaaagatagagtacgaggcgtgggttaaggcggtcgctgagggcgccgatgataagtccccgcggtggaggcatacgctgctgctgggcggaatcttgatgggattcgagggacaaaaccgacggggcttaccacgacatattcgggtgaaactcgagatggcgcttgcgagagcggcgcaattagcgctggaggagcttggtcccgagactgggattgatggacagtgcctcactatggtcttgaactatacttttgagctgctgtcggattccgagagaagcacgctggattatgatcgtttgctcccggcgatgattcagtcatcatacttgtcttcggagggcctcgacggtggctattttctgggatctattgatcaggatgttgttgaggcctccgggaagcagtttcgctggtcggccaactctcccacatttgctattatctcggcagtagctgctcgcccgcttgtgtccactctggggcctttgtctcgtcttatcgcgcattctgttgataatgtccgggatccgcgaattgttgcgcagactgttgattacctagcgggttttgttcggacactcatggttcaatggcggcagaataaattgtctgagattgatgttgcggaagaagcagagttcctagactctgaatcccgggaaattacacttcctgccctctggaagctgttgcgaaattgcttatattcggtggttatcacacttcgggctgtactggggagaactatcaatgatccagctcttgccgccaacagtagtgagttacagacgagtcgtgtcattttttttttttactaactatgctcctgtcaggcgccccgtacctatcgatgcaatgtctccacatacttcgcaacatgtatttcatctcttctcggattggccagaatgcctcatcgcagcagacgttcgttatgttggcagccatagatatcctctcacaatatcccgctcttgccgagaacttcctgagaagcattaagccaagcgatataggacaaattcctgctcacccaattgaacgatgtctggatcttttcttcttgaatgtggcagagcatttccctcttgtcctatccccagagacgaacgaggaactgttactatccgccgcttttccatatctcgcagccggtgctaacagtcttctgttggagattttcgaagctgctcacagcctagtgcttgttgtcttcgctattccccacaactcgggattagctgccaaacacttgcctttttatatagaaaaccttttcgctgtgagtttcatcctggctattatacgaaagtagttgctaatcgtccacaggttttccctactaacctttctgcgcgccaattccgccttgcgttcaagactgtcatccaaattacagcacctccttctcctctggcgaatagccaacccgctctcccttcaatcttgctggaagttgttcacgatcgtgctttgaacgcttcctctacaccgatccctgcgcagggcccaaatccagacatgagcctgagtccggccgtctctgagcaggctgttctgacccttgctctcatcgattctcttccattcctcctagtcgatgatctgaaagaatggttgcctttagcagcacaattgatcaacacaattaccgaccgcgatatgcgacatgcttgtatcgatcgtttctgggaggctatagccggcggcgagatggatgttgatcgatcttactgctgtattacatggtggagcactgaaggtgggcgcgagcttgtccttttcggcgccgagaccgccccgggggagtctgatgatactggaccttacatgagtggcgcggttggaggtgtcgcgcctgaaagtaagctataatgatgtcactttagatagcttgcaatattgaagctacggctccaacgggtgcggtaacaccttataccatacaccatacttctaatcgatcaagtctagttctgaacattttcatatatactaatattagtgtgttcttggtatttattcgactcatcatctttgaaaatgtaacgttcagcaactaaattcccgggatcccaaccggggtagcctttctgtactgaacatactcgtcgccaaagaaggagatcaagtaagcttcttctcctgcaatcacgtaaatcagttagcaagaggtccaatgcgcaaaaaccgacagacaacttacgcttgatccggctcgagaagaactgccacaacacgagggcatatccaacaaaacaaaccatattccctagtatcaactgtgttcccagaccccaccagaagaatccaaagtagctcggatgccgcagataccgataaagcccagtattaaccaaaacatgaccctcctggtgctgactctgcacatggtgattgaagttactagcagcctgcgccatagcaatagtccgaacaatctgtccgatcaatagaagcgcaaagcctgcgacaagcagaagcgagaccgagcttccgaaaaacggttccgtcacagtgaccatccgcccagcagcagtctgcccgggccagaaaacatgcgacacgatgcactccacgatggcagatccgtgcgcaacattatacgcccatccgttagatgacagcaggaacgcggagatagtcgcataccgcgtgttgtattgcgccgtcacgtagaactccaggaagtggaacaggctcagtgaggcgacgaagaacggcacgcgccacagtgaacttggatacacggtacttaggaacaatgccatgcttgctgatagcccgaggctggtgccgaggagcattgcgcgcagcgaaattcccgccagagacatcttgccgtccgggtagattgaggtatcggcatcgggcgtgtcggttgaggcatcggaggaagaagggaaggatatattgctgttggtgcggtcgtggactggaggtccgggtggtgagatgtgtttcgaagtgtgggtgaagttcaggcctttgtttggctctgcgccggagcttgttgcgagcattgtcaaagaaatagagaattgcttgggaagaaaggggctgcttcttgatgtgtttatttggttcgaaaatcgggcatttcgagggaattagtggaatttaaatagtgtgtgttggtgaggggggagtttcattgtctgagaacaatctcaagaagattgtattgtttcgcatcggcacccgcggactttttcccccgacatgacggtggacatttcaccccgggcccacatggcctcggctttagagctctaatacctcaatgtagcttgaattacaagctagtgcctagcttcgctctttctcctctcttcgagatagctatggccatcacaaccatgtcagagcctgccgagaaagagaagatgcttcgcggcgagctctttcgcgccttcacaccggacttaatcactgcccgtgcgcgctgcaagtgggcctgtaatcggttcaataagtcggacgaggtgcctcgtcggcgtcttgttgaaatgtggagagagtgggtgatgcggtcaagctgaggcttaggtctacttcatcctagaagtatactatttatactaaaccattatatagtatcgccgacgaccagacccctctgccaccaaagctagatgaccccgcagctgatgaagctctcttcgcgcaggacccctggatcgaatctccggtccatgtggactacgggtttaatgtcaagcttggagcgggcgtcttcgtcaactttaactgcgtctttattgacacatgtcccatcacggttggggctcgcactttgtttggccccaatgtgagcttgttctcggggactcatccgcttgaccctgccctgcgcaatggcactgaaggccctgagactggcaagccgattgttatcggggaggactgctggctcggcgggaatgtgactgtacttcctggcatcactattggcagaggtgtgacaattggagctggcagtgttgttaccaaggtatgttgaatgcaccttctgatagcctgattgtataatcatgctgactttagcaccaggatattcccgcttttcatgtggctgctggtaacccagctaggatcattcgtcggattgaaacgacaatgaaagagtgattgaccctgtgttattcattgactggtagatagtatagagatatatatgactttctggctacttgcatctatcgaatatcaaagggatcaaactgcgtctagattacatggacgtcatgcacgcctagttcagacagcgatatagataatgataattaactagaatgactctccaaaacctttgacaaattgggtaggattcattataccacgatagacgccaagagtccagactcgatgcataaggccgcataaggggctgtgcatctttggtgctttatatcggtttttatatagctggaataagagtgtagataggcagtcacatttgctacaaactgcacagtaatcgaattatttccctcttctttctatgcaaactgcaataagcaatgtaccatgcaaatacgcgataatcaatctccaggagcttggttgtgtctttgttaagagagaccatcttgtgaacgctctccacagaacaacgtcactggtcctggcgcgtcccccagaaaagctgtcgaccgctttatcttttctaaagacctttacttttctcccactcaatccttttcttaaactcacaaccttctttttcttcaaccttcattctcgcatcaccttcatttcacgcgttgtttcaactaccctgggaccactacgtgcggaaaatgacatggctgtacccccgccagatagctcttacaccccacctcacactcccttgatcgaagaatctccattcatcagtgactctatggacgatcttgatcctcaggcgacccggaaacgtccgcgtctcgacagtggaagtcgcgtcagtccgaccttgtcgttggatggaacctcgcgtactgcctccgtcgcacctgcctccgacatggatgaggcctcggattctggaaatccggttaacaaagtcaccattaacacaaaatctcctctatctcccatggctccagacctccctccttccgacgctgggctctccggcagcgacctagagcttctaccagataccgatacagctcccaatcccaatcccatttcactttcctcctcgccctcctcatcccgaagtcctcaaatcgaagtcgctgaaccggaagatatcaatcaagacccgaacacctcaaactggaagtcactgggccaagtggtgcgggatcaggatgagcccgaagtgatagaaatccaagacgtggctcctctttccgactcgttccctaaagtacacactgagatgacaccccgagagaatttcaaggcgcttggtgatatgcttgaatttggtaataagagactccaatcaacgagacctgggcaaaatactaatacagccaataggacacccacgcgaaggcacggcgcttgttacaataaaacaatggcttcacacttgtgtgcacgatcttgatcgcctcacaatcgaggaattcgcggccgatctagatttctgggaatacttgccctccgtcctggaccgtcttttgcgcagacaacaagactttcaattagatggaattgaagatatctcgagcttcttcgagcaatatcttctcgattatgctcgcattgtccttcatcttgttcgcttggacaccacacttctccgggctgttgacgaagatgacggtgacatcgaaatgcctccaagcacctgtcgacgatatcttcatagcttcccctggatgttccatagcgaccaaattccctttttccgggtcctggaaaatcagtttagcaccgaaacgcacaatctccctgctcgactgaaagctcaggtctcagctcctccgtttgatgcacccggcgcactcattcaatacgctttgcacctgcttgcattacttccgaattgcccgcaaatcgttaccatgctgtcaggccctttggtcaacatgctagcgttgtttgaatgcgacacggagaggaaccaaaatggtgattctgattctcccgttgacctgcctatcgattcaaccagcctccagcctttttacgaaacggttcgagaaattgacaaagtatacaacacatttgtcgcaaagaagtcgcaactggccaccagtgaactgagcgatagtctcctgaccccaatcttccgcagctaccgtttcctttgctttggttactcggaatttttgctccaacttgcccaggaattgtccattcaactacctgaggaggcagatgcagagcaagctgctttgtgtgtcatttggacgtggaaattcgataccttaaagaagcaaatcatggaaggtcgaatggagcttcgtgtccacggcgtggaaatgatgcaatcggatctggtcagcatctggggtcaaaatatatcccagaaccgcgatggcatcgagtcgccattcctgaaatatttggttgaatatcttcgggagaacaagatcctcgattacctcgtggggattgactcacacccacagctgatcagccgcagcagtaacatattcggattcctgattgtgacggcgaaatacaccgaccatgacacggatgttatctggaaaaccgtcaccgagagtcaagatgatcgtactgtttgtgaggtcatgtccatgctcgcacggacctttgccatgcatccgtcgaggtctaaagcgttgctctatgtgtgctcaaaattgcttgagtttcccttagatcgcttcgacagccgcataatcgatttctgtgagcagctggtgcctcgtatgcgcgaacggcactcggatcgcgatcgggactatcgtaacatgtccggcgaggagcatatcgattctattccactaaagctctgtatccgcctaatccgtgagagctctggagcgaaggacctgcctctggaacaaaaggaacttatgcagggatttggaagcgagcagctgggacagttcatcaaggctggactcaacgaaaccgacatggcagagacatatgagcgctgtattcaagacattgcggagatgaatgaatgcactgcgggcagtatccaagttttgaatgcactagtaccgcgtgatgacgcacgagagctttggaaacttgcgaccgatttcgacttgacgcgcttagtgataatcgaacttcaccatctcgttaccaaagactacgcgaagctcaaggatccgtcttcaaagcatggattttcttcgcgggtggaaattctgcggcgtcttattgatctggccccagaaacaatcacacctgatctcgggaacacactctggaaggatattttcatgtccgagaacctggctgctgaggaacgtcaaacgatttggaaaatgatggttgatcttaccaaccgtaccaccaaagagaacccgtttcttgaactatgcattcatgagtatctaccagatgtgcttcctaaggattactcgcgcgaggtattatggttcgctcaacagtcggttcactacgagattcgaatcaagtcacctcccattgttggggaaaatgaagtcatatctattcctggaatggatcgaatctggaacttcatactgacggcacctccgcaatcgatcgaagccgaggcgattaaattcgccatcgatagctatctggaccacggtattgttcgcagatccccccggtcggctatcgacgctactcatattgcactcgtcaatcgctgcgtggaccaactgaagtctgcagctgtcgcgttgaaaccttcttgcaacggaacaaccaatgtcgaagtttctatggatatcgacagttccaatcaagacgtcggaacggacgaacttatgttcagccggtctctacattttcttcgccaactactgcatggattacgaactcgcccacagtacagctccccgcgtggctctccgcccaccctcccggaacgtcctctgaaaggcgagcccatcgaatttcgatatcaatgtttcaatggcgcttccatgtccaagatatgttcaaagcgcattggtggtctctctacggctgccgagcttgtagaaatgcttgtgcaactgagccgattctcgaagttcacagctatccttggcggacagaaggtcgagttgctacaagatccagaggcacttgtgaaaaacctgaagctatcttcaggtttactgattcttcggaaggcccctgatgcccatgaaatcacgtgggccgggagaccgcagtctctgacagcagtggacaacgaagtgctgaagcacttcgacgagctgtatgatatgcttgacctcaaggatgatttggctcgacaggtataatcccgttggctctcttattctagcgggatgttgatactgacactttgcagattattgacttcttggtggtcttcccacctcaagtgcgggccctcgaactcgttcgatccaacagcaataccgagaaagacatgttcccgttgcaaagacctttcaaggctttgtactccttgaatacactatcgatgtgtctccacgaagaggctgcagaggtgagttaaccgtttctgggttgaatgatattcttgctaagatcgtcatagatgtctccagaccaagcttttgtgtctcatagcaatcgggttttagttgctttcctgacgtcagacgaactgttcagctcgctctccggtaactcggtaactactgtgcttgctactagagccattgaatgtcttctactggctatatccggtatgtcgaatattaattattgttcagtcaatgggccgcggccaactaattgtgacctagtgtatcgcccgactgacgatgagtccgttcttattgccgatccaatgtctttggtccgacgcgttcttgacttgcttgaaattggccgcagtggtcccaatgatccaccggcttgtacatgcgcccaaagcttgatttgcaattcctttgcggtcttagtcgagggttcattgcgcgaccttaatgtctggaacgctgtcaaacagcatgcccagtttgatcgcttaatcctatctctactcctggaagaaaatcgaaagccaattcggactgatatcctggaacgcttgaagataatctgcgggcccctgaaaccgttcaagctgtctacgaaaaaacccgagatggaaacccctactatggaaaaccccaaccggattgacatgcttgccactctgtggtcttcatttttgcaagtgatcccgaggaccgttgagcatgttccccagtctgaagagttcttccacgctgctctatggatgttccgcacagtcgctcagaaatcgcctcgggacttgatcttcaacgagtatcttcaacaatggagtgcagttatgctcactcaccaaacagaagaggtattttcatccccgaagaccaacaaatactgtttactaatggtttttagtttgttgggcgtgagccagcagacaatttgatcatagggttctctgctttgttagaatggtgtctggaattgggcaacgccgcgggcatcactttaaacactttgtatgtcttccttccccgtccgatcaagtatgcagacatgcctaactgggttttaggaacatcgccgaagaaatattcaacaagtacctattcccggatttctctccagaaacggtggaacatgcagtcccacagattccagtcatgcacagctacactcgctcgagcctttacaatgtcgtgagcctgttgtgcaagcagaacgatcggacttattgtgaagttttggacctcctcaatacaaatgttccacgaggttagcatcacggaattttgcccactgcgttttattttcacactgaactaaccgcaaatctagactccccttatctggaatatgcatataatagatcgttgatgcttcggtccccggaaggctatgcgggcctcaaaaatctttcgaacacatgttacctcaactctctcatgacgcagcttttcatgaatatcgagttccgagactttatcctgaatctccccatagccgatcgaatctcccaaaagctactctatgaaacccagcgactgtttacatggatgcaggagacttggagcaagagcattgagccctcagactttgtgaaaagtattctcacatacgacaacgaggagattgatgtgaccgtccagatggacgtcgatgagttttacaaccttctctttgaccgctgggaagctcaggttctcgatgccgacaagaagaagaagttccggtctttctatggagggcagcttgttcagcaaatcaagtcaatggaatgcgatcatatctcggagagacttgagccattctccgcaattcaatgcgagatcaaggggaaggcgaccctcgaagacagtttgcgggcctacgtggcaggcgaggtgatgcagggaggtaagttaatactgcgcccctaagggagctcgaagtctaatgagccttcagataacaagtactcttgtacctcatgtggccggcatgtagatgctgtgaagcggtgagtgataatgatatagtgacacaaaccgactttctgactcttatttagtgcttgtctgaaagatgttcctgataatttgatcttccacctgaagcggtttgacttcgacatggtacatatgctgagaagcaagattaatgacgagttccaatttcctcaccacatcgacatgactccctacaccgtcgagcatctctctgacccggagcagaccattgcgccggatatctttgaattggtcggggttcttgtccacactggtacagctgaatcgggtcattactactcgtatacccttgaacgcccctcgtctggcggcgaagccaattgggtcgagtttaacgactccgatgtcggcaaatttgaccctagcacaatcgcaggtcaatgctttggtggtccgaatgagacgacgcagtacatgaatggagcctctaagagcaaagtctggaatgcatatatgctgttctaccaacgcgtgtccacaattgagaagtccaaagaaatcttcaagccaacgaagcccgacctccccatacacctccccgtatcaatttcgacccagaactacattgcaatggacaacgaaatgctcattcggatttactgccttctggacccacaatacgcatacttcgtgggcagattgcttcagcggtggcccgacatggcaacggaggataccgacaagactaaggcagagtcattggccatcaatgtcggaatggacactattgagcaattggtgacacgtaccaaatatttccaaggacaccaggaggtttacagcgaactcgtcgacatgatcaacaaaagccccaatgcagcccaatcggctcttgagtgggttattaatcggccaacttctatgtacaatcttatgatcaagacgcagaacgcagaaatccgaagcaagggaatttcgctgatcaattattccttgaaacatctccacttgatgtcgacatgccaggatctcaacgaagatgaacgaatctcatggcgcgaccgattcgatgaagctattcagcaaattgtgcccatggtgacagctctctgggccgaagttcaatcccttttacgagtttgggacgactactttggcttcttattgaagctttgcaactatggcccggagattattcaggtcttactcgatcaaggccatttcgctacatgtatggagattctctggatcgatgaagaagatagcaagaaattgcggatccggtatcccaattacgtgcgcctcttgaacaaaggacgtcggttcaaccatctgattttgctgtcattgtgcttggtattcttcaagcacgttgacctttcgctccgtccaacccccattggcggacaacggcggtttttgaatggcaagttctcgaccagcatcagagaaattgaactcatcaagcctgttgaaaatgatgggtctctgtctatcttgctgaagcttctgaagcatgagactcttgcgaggagccagactactcgcgcgatcataggagtcctgttagacggagagcctgatgcaggtttgttggattcgattcaactgacactggagaatggtgtcagactagaacccgctatccagtgtacaccattcctggaggcagccacaacgttctgccagcgttgtccggataagcggcgggtcattgacatgatcgacttcgttgccaagggggtcgaaagcattgacaatagcggcggccaggagcatattgacttcttcatgtgtctttgccgtagtaccaacgagcggctgaacatggactctgcgaattttgcagagattgttcttgacaatatctcagtctgggccccgaccttgctcattgataaagacgagactgtccgtcgcaatatgcagaatattctcgaagagacgatctttaacgataagatcgtggaaggcaacacagcggactccgaacagaatggcgaatggcagaccattatcacaccagagcggcgccatagcctttgccgtcggctgccgaacgcatgcatcgagcggctcaaatcggcattcttgaccgatcagatcagtcatatcgacgccagactacttgaaaatattaccccggtgatcaactattgtctggctactttttacgacgactctgaggcggaccagcaagaagttcaacaggccaatggtaggtttgagtatctacacctagggttcttgcagtctcactaacacactcttctcagaactcatctccctccttaaatcgatgtcgctcgaagatgtccccgatgacccgccttctggtatgcttcaatatctatccctcctgaacggccctggaacatcatctaacccgatacccctagaatcggacgtagcctcagtcgaagattgggacgcaaactcggtgatcgcaactgattccgagatgggagtcgctggatctccttaagacaatggcatttcccgctgcaaattgctttttgttgtgtttctttcccatgcgtttttgcgatgtcaatggattcagcgagcacgatgtgtgcatgtgatcaaaggcaaatcctcatacctcacggattttacgaattcttgctgtgtttttcgccctatgatgattgtggttgttcgtggcgttttcttttgctcatggtgagccggagtaggatttatttctatgaagggtggctttggacggacagctcatctacatgcatttcgcaagactatttccgagcattgagataaatagtttctgtcttgagatttcaaatctttgagtggattgcattcaacaaagttcgtagcgcatcattttgttcattttgttcaatgataagagtaacacgtatctctattttattttgattaaccctcttgctctccgccagctggagcatcgccctcatcttctgattcaacctccacagcagcaagtgcatcctgctgagcccgcggagcgccgcgagtcttcttagctttggggctgccggggtcagcagcgttaggtgcggttgcgagtttagtcgctggaatgccaccagaagtaacatagaggaagtaacctgcggggaagtgatcgatatggttgaagaaagaaccaaagctacagtcaaagtcagtattgccgtcttaatgtgaaatcaaacgaggacgttggttggaataataacatacccagcactttggtcctcctcccggaaaattcgatcatagatctcccgctgcttgaactcattgatctccacctcaaacttctggaaattgatcggctgacggtcaagaccctgtgccttgttgttgtacgcgtcgaagataggccgctcaagcaagaggcccaaaccaggcgctttgggaatagcaatgcgctcaggaccataggtctcggtgatccggtctggatggcagcctgagcggacaaccatcgtagccatggcgaccatcttacggatctggtgcatcatgaaactctgcccatggactttcagactgagccattccgtgccgtcgatgataatcggcgttgtgttcaccttgaatgacttgatgtgccgtttcgccgaggggtcgttgtgcgtcttctggatcgtgtagttatggaagttcttcgtaccttcgtagcggtcgagacattcttgcaggcgggcgatgcgtgaagcgggagcgcggtaggctcgtttggcggtgaggtatgctgctttgatggccttgatggcatcggcgatggctttttggcgggggtccatgacaaagggctttgaggcctctgcgtcggccggctgtttagtcatgggctgttcgctggtctcctgctgcgcgggttgctcggcgggggccgaagagacatccttctcttctgtgggttggagtgcatcgcgggagtcgtctaggtagagagacttttcgacgatgcggcggatgtcttcaggcagggtttctaagatcggcttgatgtactctatatcagcctcttcccaatagcctgcgacctcttcctgtcgagccgtgactgcatccaactcgcctgccttgtcggcaagctcgatgattttctttccaagataggtgcttgggtgaggcggcaggagacagtgacttggcagcaaatactcgtaaactcgggagtcgcacatctggtagcagctgaaacttttgctggtcacttcgtagccccagacacgaatttgggggctgagctgagcgtttattttcccgattatatcttcatcttcgacaatcatctttagtgacacaacatttccagctgcgtggacacccttatctgtgcgggcacaacggacgaaggaagatttcttgggatctgccgcattggctttggaaactgcgccgacgttgacgagggccgtgaatagatcaccttcaatggtgcgttggtgctcgttcctataccaaacattgttagcgcaaggatattaccttacaccgaagcagaaaagacttacaactgcatcccggagtatccagtccccgagtaccccatcagaagcgcaaccttctttttggggcggcgctcttcgctgtcgatctcctccttggagaattgggtagcgtagatcggcaagctgacatcttcgccgttctcgatcttgcgacgcttggcttcggccttgtcttcatgacgctgtcgcttatctatcgcttggcgacttaattagttagccgacaatgcgaagaacgggaggttacaattgacgcaacatacctccattccgctcgccccatatcgcggttcttacgccttccaccacctccgcctcctgttcctttgttgtcggccattgtatccgctggaagatctctgatagctccgcacgaggtgcagatgggtcgcgccagaaagaacggtaaaattgatgactaacagtgtggttcctggtgttgtggggaagcgatcgaattagaattgaacctataggcgcagttaggatcccagaaaggttccgttggagaatcgaggcacacatgaaatcaattttcggggcaatttgtcttcgactacgccttacgcgcggttcatcttttccctgatatgggcactagtcctataacggtctagtgtgtagataaatcagactagccatatatggtcatatttacacctgaggaatcaactttgcatgtgacgtgaagctccgcgctttgaaccggaattgcaactgtccttgttcagtcaatcaattgcttcagcgcggtctgtcgctcaagcgcaactataattctctcgtggaccccttcactccttttgctgcctttgattgaagcatgcttgtcttgtccactatctgaacactgcgacttatcgccttgcgctccagttaaattcttttccgaccttcttcccgactaccatcttttgctccgaagcttctgcaaacatggagctttcaaagacacttatccgaactgtggcgcgagcattttacgagacccgtcacatcttggtcgttgatgcgctctttctacattcagtgtatgatgagagttgatctctgttgattggtcactttgctgaccagctacagtcttcacgctgaggatctagcctttttgatgggaatgcaacagaaagatcttcgcaagctttgcgccaagcttcgagaggatcgcttgatcggagtgtatgtcacttctccctgacgtgatctacaacaaagggtgcaaaacacaaagctgatctagttctattttgattttaggagcacacgcgccgagatccgcgatggctctactcgcccagtcaatcgcgaatattattacatccccctacacccggttgtcgatgcgatcaaattcaaagtctccaagttgacagctatcatcaaagcgcagtacacaccgagtgaagagcgcaaggaatacatctgcgtacgatgcaaatccgaatggaccgaactggatgtattgagtctggttggagatgaagggttcgaatgtcaaaattgcggcgccatcctggaacggacggaggatgtcaagggcgcggaagggatggaccgtacgggccacgagaaaaacagtaagcttatggcacagctagataacatgctcaaactgctcaagcagattgactcggtcgaaattccgccgaatgattttgaaacagcgtgggatcacaaggtggaggttattcggaaccagaatacacacccagtccgtgccgcgattgctgttcctcccaaggcccaggatatcacacgtcctaatgccaagacggatgccgctgcactggagatctccctcacctcaagcgaggaaaagagtgctgccgagcaggccgatgaggccgctcgtaaggcagcattggagaagcaaaacgcacttccagtttggcacacacattctacggtcaatgcatcccaggttggcagttctcagatcaagaccgacgttggcactgtagtgaagcctgagcttgtggacgaggaccaaaaacctagtctggatgctttggacgacaaggtcgccgcgtactacgctgaaatggagcgcgagaaggaactgcaggctcaagcagatgccagtagtgcagaagatgattcagatgaagaagactttgaggacgtcgaggggatctctggtccaagcggaccggctacgccccccatggctggggggctttcaaaggccnnnnnnnnnnnnnnnnnnnnnnnnnnnnnnnnnnnnnnnnnnnnnnnnnnnnnnnnncagggggacgggctccgcccgccatggctggcggtcttacaagtgcccctaccacatcttctgggggcgctggcaccaagcgtgaacacgaaccggccgctactgtccctccatcatcaattgggactccgtctgcgcctgccgacgatggacctgcggcaaagaaaatcaaggtcgatcctgatatcaagcctgatcctgatgttaaaattgaggctgaggttaagaaggaggccgaggaatctgatgaggacgatgaggaatttgaagatgtataatgaaaccattaaaaaagtcaacattggcgctggcgccgaataatgatggcagactgtggagccctggaggcttgcaaaaccattcaaatcccgcatagccatagaattacattttgcccaatttgcaagacttcagaatcaagtaaattgacaatggatgacgagacaaagcaagtacgttgcaatccagtaggtatgcccaatgaaagagattaaagataatcgaacaggaggagaagtaggagtgctcgctgatgcttttgagcaaaaaccagaaccgattgctgtgctatgtaaagaagccatgtagctcccctacttagaggtataagatgacgctgtagtaactcttgccctcgccggctattgctagctctacaacacaaagaaacgctctatcatgacttggctaaacgtgagattcttacgtcccaattgagacgtccctgcagccatggcggcgcttggtaaaatggtcagccggagacatttcagttgagctcggagtttcttatgttatgttcgaattatatatttaaagtcatttccattatttggatttggtataggtagaaacatatctcagtaaacatgacggcgattgcactattctgcctatttctattggcagctaccagtctttatggcttgggtcgagttgtatacaatgtcttattccatccactgcgaaaattcccggggccttggatggctggagccacatcgagttggaaagcatacaaggaagttataaaacaagagtcggcggttcatgagctctttgctctccataagaaatacggtatgaatgaatggtatctatgagaaatcctcttgacatttaataggttatattgtccgcgttgcgccgaacgaggtgagtattcataagcccagcagtctacacttccctctctgggttatagggctcaaacaggttacttacctctcacagctccattttggaagcccaggcgcgttccacgatatctatcatagcagcaaaaggtgggacaaggacacgggtctttatcgaacccccggagtctcatctgggtcattcacgttcttgaaatatgctcaggcaaaagaacgacgggaggtgattcttcccattttctccaagaaagccataaatagtcttgagcatctcgtctggcgaaacgtgagtattgctttgcttctgttcactggcaacctaccttttatccattgctaattcacggtttctaaataggcaaatcgtcttgcatcttctatcgccaagacaaatgccacaaaaagatctatcgacctactctacgcattccgttcctatactctcgacactataatgtgcttcacattcggcaactgcgtaaacgccctggatgcgccggcattcagcgaccctctcattctagccatggacgccagccttcgtatgctgcctctcatgaagaacttccctatgatacgagacctcatattcaccgttccaccggccctagtcatgcgccttatcccaaacgcccagaaactagctccacgcctataccaggtccgggatctcgtccaacaacagcttcaaatcgtcctaaactgcccttcgaagctagataccgtgccacaccagaccctctttcaccgaatgctcgacccagaatcataccggagcaaggaagtcctgaatctagcagaactacatgacgaaggcttcacactcatcttcgcgggcgccaacacagtagccgacacgctgctcatgggccactggcatgcaatgcaaaaccagactttgctaacgcagctgagaaatgagattttgactgtctggcccgacatcgacaaacagccatccttgacagatctcgagaccttaccactcctcacggcaactatcaaagaatctctgcgctttattccatctggcgtatcgctaacgcgtgtcgtaccaccagccggcgctgtgatagcagggcaacagatccccggtgggacggtggtggggatggctatcttacatgtgcatcagagcgcggaagtatggggtacggatgcgcttatgttccgaccggaacggtggctggagagttcagatcaggcaagtgcccggaatgggaagagtgaattggatcactggctcgttgctttcagtcgggggccgcgtatgtgtttcggtatgaacttggcttgggcggagatgtacatcgctttcgcgactatggttcggaactttgacttgactattgacggcacaacggccgaggatatgcaatggcgggagtgcattgcagcttactatcctaataggcatttgcatgcgtggtgtcggccggctgggcccgggaaggtgaagtaaagagttggtgcttatatagctttgagtttatgagcaaatacaaactttctcacacgagcaaagtttctatcctctaatatctagccttatgttaggaacaaaattgtaagaccccggtcgaaagaaaataatgggctcgtattttgaatacgcctgcgggtttttactaccacaagtcactatcataaacatagcagacaactagcgaatttctttctcataaccaggtttcgccatacttgatagttctatatgtctaggaaagaaacgaaacagggctttgagagccaatatattctagaatatcagatccctaataaatgccctagtctttcccctatttgcaacaaattccttttttatagtttgcaagctagaacggagttactaaggtcaaggtgagactcactcatcaaagtcggccgctatacttggccgctcctccgatgcttaatagttctgaccagtttcggggggaaagagaaaaaggaacattataaagtccgatgtgctgatttgcgatgttttgcactcttagtatcacggagtagtactcgagtttaggtaggcttatatattcaaaatttccaccaatgactttgataagctaggacttgagtgttatgcccactatcgtcatagaattccaccatcgtcgtgtcgaccacaaagtctgcacgtgaaataggaaagtaataagagaagcaggaaggtctcatatgctacctaatataaccaacccatggcaacaaagagcggaccgacaagcattgcttcagtgtaaccatacatttattaatcgtactctaaacgaaaaaaagccaaatatgtccctgagagcccagagtcaattgtttagaccgtaaccctattagccttcaaatactcataatccggcatagaatctcgcgtggccttctcaagcaactcagcaatctcatccccaaactcgacacgccacttagcaacttcctcatcaatatcaactgacactggagccttgtccttaacaacaccagtcgactcctgcaaagtcgacaacatgatagaaacggtattcttacgaaacgctagctccccaggctcaccaacgtttgtactttcaggcgtctcggattttttcgcagagccagtccactcaaactgcatggacgcagtgtccagaccaaccttctcacagaacctaatcacagcaccgcggttatgaatcacgtcattggcatcaatgaccaaaggcgcgacagactcatcgggctgctcgagacaccaatcgaataacttccgcgtccattccatgctcatattcttgaccgacacacccttaacgtcgtcgtcttcaatgacaccggctttagacatcttctgcatagcacggtacatagatggccaagctagtgccgggtgacggatgatgaaggccagctgccaggtgcgcaggtactcgtccggcatgacagttttgttattggcagagaatgtctgcgagggcccgtagcattctggcgtggatacattgaactctttcgcgttctcttgctcttcggcgctgtttatgtttcccgtgaagaagcgagggttgaggaaccagaaggcgtgttctttggcaaacattatcttgttgtcggcacgcgctcggctggagtagtcttctagctcgttgaagcaccgttggatggcggctttggtctcgctcttctcatctactgtccattgttctagcggcttgccgatgcgaccattctcgctggctgtcatgaatgcatcgtagaagaagtagcctcccttcgggttggtgaggacattcggttgtttggggatgttgaggatcttcaggagaagattcgaggcggtgcgaggcacactgacgataaggactcggtgtggttgatcattgttctcaggggtattggtagtaacagccatggtggatggctttttgatgtataggatatggtggctgaatgataattaagcttaacttgccgcgaggcaatgagcgtgagaagagatggctacattctggagtcggatggtgtcatctcacttaaatagattcgactcaccctgaccaagcgcaagatcggcgcttttcttgaccaaatttcccctggcccctctttatgcatgcaagtgggccgaattctgacctctatgtggtattcgaagtccgacgcggcgggggttgagcagatagtatttcctaagggagtcggactcggtatcaaccgctccgatcggtgtttgtcgctgttgataaacgccgagagagggtcgacgatgaggtccttgattggactgcagaagtgatcggcaatttacatcttgaagaaacagcaatggtacgaggtatgtctcagacctcggccttcctatcggaggatatgatcagtcgcgtcggatgatacggtccgtggtcactgatcgacatggttttaccttgagttatacacttacgttatgcattcatctgtcaaacatctgtacgtcgtgaatacaggcagtggcagtgtagagtggagcagcaagatttgaaaaattgaggatatttttgattcttaaggctggtctggagcctcgaaggcctagtcagagacaaacacagctagatatcgagttcgaagtacaacatatgaaccgctaaaggtccggtgtctatgacttgacaaggttatcttgtagatatactaagccaatacactaaagcatacgtttccgcaagatatatcaagtcaaacccggctcttactaaacgtactttcaccgaggaaagtcggaatcaccgctctcactctccgccttaaccagactctgctccctcgtgagtgtcgggttgcgaataactaaggcgaaggcaatcaaagggactgttaagcagatacccgtaatacatagcagacgctgcgttttctggtaggcgagaatgacgttgtctcggttgggagtacccacgggattgaccgccgcaaatgcaagaggctgggcgtagacatacgcagcgagtgtttcgttgccgagtctatgattcagttcagaaggcaagacttgattccagatcgcaccggagacagtatttccaagtgcgctgccgatgttgtaagcggcgaggtagataccagttatcacggcaagatctatgggattgttagccctagagtcttttttttttggtagaacaaagcccgttggcgagtactaacgttcgtgcttagacgcaacctgaatgctggcttgagctgggtaagggaacattccaccagctagaaattttcgttagatatattcaagcaacgctggaatctaggtgataactcaccaatacccagcagaacttgcgcaccaatgacgcctgaatgactggagtgcgcaacgccacctcggaaatagatgaggattccgaatgcaaccatgaagaggagggttccggccacgatgaagggcttcaattggcgaactttcataacaatgaggccgagaataacgccagtaataacagaaacaaaactgtaaagagatgtgatccgagtcgcactgagaattgattcgtcgaagctcacgtagagaactgtgtacaggaaatctccttgcaggtaccacgctacacaaatgttaaatctcgaccatggatggatggtatcctgaaggacgtaccagtgttgagcataatggggattccaagggcgccccagacagcacggtctttgagaagctagagtcgaattaaatcggtaagaatcctaaatggcttcaatcatttgacttaccttgaatggcagcatcgggtattggcaggttctctcccagaaaatccagaccgggatcagcaaaaagcctatgataagtggcgcaattaccttcgctgtcttccactgtgcacttacgcctccagcgagggtgaatggaacaagaatacatgccagcatggcaatcaacagaatgtttccgacgatgtccagatgccagaacagttctacagctagtttcttttttcctagcaactggagagagctcttgtaagattcaagtgccccagtcttcttcgcgcgtcggttgacgataaaaaggactgcaataagagggagagcacatgcgggatagattatagcaaacatgccgatgccccatcgccatgtggtgatcttgagaacggcatcagtcaagttgccgctgatccaggtattgatctaaaggagattcagtaaattaatcagttagcgtgtaggattacgtatcgtacgcacaataaacggcaaggccgggatgtaggagaaaagaagacgagatcggctggaagtcacatcggcgattagaacttcgaccagaagcataatactggtgtatccaatctagacaatattagacacgggccaagatttcatgagcgtatatctcacctggtagataacagcccccgcagcgaaagcctccaaagtcgttgcgcatgcctccactatagtacccacggtatagaagacgatcgaaagaaggataagttccactctgccgaatacatctgcaacctttgccgcagtgggctgtaaaagaatagtcagctgctgtgatgaattgttggtctctggatatccgtacctgtgcagcagcagcgatgacggctcggagaacattgatggtcgcaagaagactgtgttcgccgtaactctgagtagcatagggctgttcaagacatgaggtgttagtatactccattctcgtcgatatatcttgacgtcagaactgcgagatacgtacctggtacgtgtaacgaacagttccatccaagccatacacataggcgatcaagaaaatagcaataaagaggaagatccgatcccaaaatcggaagtgtgatgtaatgatttcgatacgacgaacacccggactgcctttgcctagcaggctgacaggctcaccaagcgggatggcttggttgcggggctccttcgagtcctcactgacgcggtggtcaacgttggtctcattaacgagggacataataatcgtgcagaatcaggtctcactcggattacctatgtagagaggaagaacataggggaaagaccagaaaaatgaaaatatgactgccaagaaaaaaagtctaagataaaactgcttcctcaatcttatctgatgggcctgtcacctgtctaggtaggtaccgaggcgcgctaggagcgtttgcctgggaaaacgtccactcacgcagctttcatgtggcccacctcgtatagagccatggctcaggcttgctatttgacacagatttcccgctttgggcttggctagtggcaattagtataagtctgtggatattgtatcggatgacttcctattctagcataacaacctcgggtcttaggtgaacgtgaagagaagatgtcatgagtgggcgactaactgtcttggtatactgttataagccatctatgtgaactatgtccttgttttgcaaagtgtatacataacaagaagaaataaagtgaaccctgttgaaccctgtccaggtggagctggccccggattaaatccattacgtaagaataatgcccgcaccacatggctggacgcgtcttggcggccgtgaaagcccacaacatatcagcaggctcgcacggacatgcaaatcttttcatcaaaatattaaccatgttatatagcagtctgtacggttaaggcaggtagagaatgctcgccgttttgccaatactgtgtccagtcgcccaaacttggcagcacttgtcaaaggagtgagtgcgacatgccggtgatacgggctttgcagactttgctggctactccgactctttctacgaagcgctcaccaaattgaaaaacctacaaaccctggccatgagagatactctccgcccaactaacgagtacacgccacaggcggcattattggcagtacttaccgaaatttactacgaggcccaggactcacgggtgagcaattggtgtttggaagatttcatgatggagatggatgatcaaggttaccctcttggcgatgcgttggatccgtttggccttgattccatccttgtgaagtggacttttcactccaaggctgggcgcaagagctggccgagtccacatatttcagccgagactacctcaaggacttgattcccgcactgcgaacatgtaagttgcccaatttcggggcttgtcgaaaatatctattcttacataggaccggtcatattggaactgattctcctgacctatcactcttctatcgattttaataaggaaatcttcacactgccacatttgcaaaaactctgcatcactggcgctaaattttgaaaatttgggttgcaagaagcatcaattgacaatcgtgccgcaagtctaaaagagttgctgcttctcaactgttgtgtgtccgctgaagatctcacgctcatcgttcgatttccacgtgccttggaacggcttaccattagagttcctatgtcactaaaatctcagtacgaggaagacaattatgtattcttctctgggagattgagtttccagcattctgaatccttggagtacttggatttagacatttatgggggcgcagatcacggccttgacctcaacccctttgatgttctcaaagaaatcataatcacccctcattcaatacttggtgatcccgatgaaaaaatgatcatggcacgtagtctccagcgacttacaattcgatacgaggaagggactcgtctaccactgaattctatcctcgaagagctcgagaagaagaaccttcccaatatgcgctctgtgatatgccagatacccgacaatatctgcgaaggtactaccagctcggagatatgcgtcgaggccgaggctttcaaaccaaattccaaagagttaggggtgaagctatcaacagaactcgttccataccctctcaccatgccgaaatacgatacctgcccgtgtgaaaacttaacgttcttccatcaattcccctcccatccccgtgtcaaatctcgcccaccaaacgaacatactaccaatacaaccgatgcgggtcacagcaaccctcatcccgctggtgtgatttccttcgatgactatgacccatattatgatgacccatacgagggtaaccatccttccttgtatgacatgagcccacctactcctccccgaatgcctacctttacggattacgatgactattgtgattgggcgtacgattgctgactggaggaaatctccgtcttctctttcagggcgtgccttttaacggtacctatttgtttgtttgtttgtttgtttgtttgtttgtttatcctatattctatcttcggtctttcttcaataaccttcaacatatatttggctacgcgccgccgtgcggattgatgctaacggcgtagcggcctgaagtatgtctacgtctgatttctaggatatccttgatggagtctttgatataactggaagccgtgtctgttctagaaaagtacaagatccagatatgttgtagaattcaggcttacatgtgcgaggataaatatgaagcgaagttggacaattgcaataaaacttggctgtaagtattgcctggagatgaaagcaattaaacctatatttgaggacattatcactatcaaagtcgtgacctgaatgaaccttgtgaaccaatcggcgaaggcaagctatcctgactgagacgtttcatctcgggatcataaagcgactctgcctcaacagtcgccttgatgcgctttccaaaatactcgatctctactgtctcaccttcaccaacacccccaggaagccaggcgtaggcaatcggtttgcgaatcgtgtatccaaatgcagcggtggtgacatatccagccgcctttccattatagaacaccggctccttgccaaggatcatcgaccgaccatcatcaacggtcaaagcccgcagtcgccgcgaaggtacttggttggaaaggcgctgaatagcggctttgccgacgaagtcatcttgcttatttgcatcgacagcaaatgaaacaccagcctcgaacggattgtgctctgtcgtcatatccgcgccgtaggtccggtatcccttctcgaggcgcattgagttgaacgcactgcgacctccagcaatgagtccgtgtagctttccagcttgccaaattgtgtcccataggcgctggccatactcggcgctggtttggatttcccaacctagttcgccgacataggactttcggatcattgtaacagggatacccgcgagaattgttttcttcaaagtgaagtagggaagtcccttgttggaaacgtcgaccgtgctgattccagcgataacatcccgggatcgaggaccccacagtccgatgcagcatgtgctgcctgtgatatcgcggacctgggtccatttcccgggggcaccttgttcctggactcgagcttctctggtaagatacgccagatctgttgcagtgttcgctccaatttggaacacatcgtcgtcaagtcggagtacaaaaatgtcaccccgaatgccaccgtgatcattcaggaggagcgtataagtaacggttcctatcttggtggtcatgtcactcgtagtgaggcgctgaagcagaccgattgctccgggaccgcgcacctcgaaccgatggaaagcagtcatatcaaacatagcaacagcattccgcgtcttccacgcttcagcggcagagatcggcgaatggaactgcgccgaccaggcatctcgttcgacaggttgccatgatggcgggagagatttgacaagatctttgtttgcctcataccaccacggccgctcccagcctccaacctcgaggaagaaagcccccagctccagctggcgaggatagaatggactcacacgcaaattgcggggcgacgtacgcggctgaagtgggtggacgatgtcatatatttcaacgaagttctgctgcgcggtctcgctcacgtagtctcgattgagttggatttcttcgaagcgggatagctcacattcagacacgtctatatccgatcggccggttgtaagtatttgggctagagctcgggcgacgcctgctgagtgtgtaacccatacggcctcggcgacgtagaagccgtcgaggtgggatggttggccgaggattgggccaccgtcgggtgtgaaggaaaatatgccattgaaaccatctgcgatttctgtgtccctgagagcggggagaagctcttgggaatctttccaagccgggtcgaaatcttcggttgtgaaatcaaggcgcgaaggcatgttttgttcgtcaacatctttcggagtaaggcccaatgatgacgcaacgacgggcattggacggtgtgcgtaggatccaatgccgtactgcccgccgtgttcacggtagtaaagacgcttgtcctggtgccggaggattggtagtgcggcattcattccattgggcaagctgttgacatctcgtccttcgagagcaggtactgccgtagtctttgcatactggtgccccagcgggagcaaaggaatttccacaccgaccatggctcccaattcaacaccccagaacccagcgcaagaaacaacaatgtctgcggggatagtgccctttggagtagtgactccggtgacacgtcgaccgtccctctcaatccccgtcacgggggtatggcccagataacgaacaccggccttgctcgtccgttcaatcagcagttgcgttgctcgggctgctagtgcgagaccatcggtcgggacgtgcagaccgcccaacaccatatcggtattcagatgaggatacatcttgaagcactcctcggcgctcagtagccgcgccccgattccccatgatgaggcgtatccatgtttccgcttcagctcctccagtcgtgcgggagttgttgctatttcgagactgccgacctgattgaagcatttgtgtccatccttctctattgaaagaagcttctcggctgtgtatcgtgcgaagtatgtcattgtcttggaggggcttgtctggaatacgagtccgggggcgtgtgaggtcgatccgcccggcatatgcaacgggccctgctcgacaacagtaatatccttccatcctcgagagaccaactcgtcggcgaggttggtacccacgatgcccgctccaatgatgacgacacgttgtgaaagggacattgttatgtgatatatgatagttaggtgttacacgcattagaaagcggcaggcaccgcttctatttgtatattcatatacttgataggttgtacaatatgtgaaattctggtacgtatctccccgcaccgtgtatcggtgtgtgataagtatatagtgtgtcttgaagctgacgataaagatattacaccccgcacgggttccggcgatgtaaagccgagaattgtagtaaagaataccgatgccattttcggagcaatcggaatggaggggtatatcgttggatgccccacgttcctatagataatgaagcttgtcaagtcaatcagaaccggccaaccagctttatgtggagcatttgcgttgacaatggataacatttccttttcgggtcaagggtctcaatcttaggctattttaggatgaagggagcgtcataatttccgcattgaagttagaattattggtttgcaatcaaagccgcatcaaattacagcaagtcaagtctacatgttggacggtttatggccgaaagtcgcgttctgaaggccacgaaagcagtgtatcgatccgggtcatactttgaagaaagcaggagtgtgccaaacatattgtagggctttgaactatatatattgagttaatactaatagatagctagttgaatctaatcactagctatccagttattttacaggagatccgtaggaaatagcaagactcagtctatttgagatacacttactgcttgtctacgtagaacggcgaactctgtgcacgcatacacgcacttaacttgtgcctagaagacgctgtaaacgagttcctataagcacgataacttcatggacagtgctgaaagaggcgatcatataccctcactatcaagcttttccgttgtagtcgattgcgaaaataaccattctagttagtttacaaacacagacccacagtctcgattgaccatagcgtatggtaaaagttcttgattgccctagcaatctccggagattcagttaaaacgtcaaacttgtggtctacaactagtatttaagcaacggtatccgagctttaaacggatctaaatgtttagattcgagctagctacttatagtaagataataggtgatcgtgcaataaatcgttggtaatgaagcattgtcattggcagaacattccaacatcatagacgaaaatgatgcaatcgccattctatggcctctgattggccaattgagaatggatgcaggtgcgttcaatggaggcgtggagtatacaaatcggttgcttatagttctggatgtgacatgtatcgccaacatctctgtctatgaacttttatgatacttaatgatgtcctaaagaacatgctaacccccaaactatgcggggctgatgttcgatgttcggcgggagccgatccgtgggggaacccaacaagaaacaatccatctgagaccttcaccctttctcaagagaaacacctcagctggaggacagcaatgctatcatctgcattcttcgcccatttctcatcatgaccgagcctggccaaactcctattcccgaggagccacctaacgcaatcctgaccgactcccacccgactcccgctcgcgacgcccgcgatgacaacctggaagcattagagctccatgagatccaaacgcgagaagacaatgagctagactactcaaccccatcaggttcatctggcgacgagaaccacgtgcccacacatcgaactacgtctcagcgggattcccggcggagacgcgaagcccgcaagggcctttggagccagatctgtcgattctggactcgaaatgttagtataactgtgccgcagaagagcaatcgagatcactttggtatgttgtactttggacacgctgttggcactctagttgacatgttcaaagccctggaaaggacgttccttgcgtacatccgcacgtccatggttatcgctatgcaaggggtgcttgttgctcaacttttccgtctacaacggccgttggaaacggtccatcgcctgtcattctaccatgtcggtatcccgcttgcggttgcctgtcatgccgtggctgttatcgtcgccttgataggttcattccgattctggagacaacaaaatgctattgctcgtggcaaagtttatgctggggggtgggaattgaattcagtggggattttactattccttgtaagtcatcactaggacgatgctcggcctctgaattctaaccaactctacaggtcattgtggcgactttggtacttaccgtgatcatcttgattgaaaccaacttgagccccagtgttctttctaatcgaatatcatggccttgatgtccattgaaatggtgaaggaaaattttacccaagatgagcacattaatgagcatacataatacataatgaataattcatacttgtgatattattctatgatccgcatgtttttcaaatccattgccgttcaaagctgtctcgctttgtcgcagattgcattcatttctaccttcgagcgttctgttcaatgagatcctcaatgggaacaagcgttctctaggaaagttgcgtgaaccttacctacttgttggggacgcctcccaaacagccacctagcctgcgtcttctggtggcattccctcccgagcatgaatatttgcgccgtgttggcatccccaggcagcactaccctgtcacccattgggcaagggcaagaagaagcgtatgggtgggtatcttttatacataatcaacattccatatccccgagtatggtgacgtttaaactgcctacggccctacttagggcatatattacgctccaaccccccgaatcaacctcaattacttcgacacccagtagctggcacattaccttcaacataatcacacccattggctgtgttttcatgcttcttgatcctgctatgagtaacaccaatggcactgccagatcccaaagtcctgctgcaggtgaaaccaagcgaagcaaccatgcaatgtaagaaaaggataacaattagcatgccggtggttttccgcctctgtcaggtggagagaatgttacgctttttcttcatgatcatcgaaaggaaaatgagaaagaaccgcagtcttctccatatccgtgcttgaatattccatcaaaccatccttgatgctctggatgacagccctactccgttcaagttcatcctcatctgaaacccagccaagggcatctgtcccgattagatccctcatctcgcccaattcccgtagtttctcctgttcttggcgataatccgccgaacatttctgtatctcttcctcagaaaagtgaattggacactcagcagatcttgtctgtgctcctccatctagcgacataggccaattcttgaggacctgtagcataacatactttaatgaggtagagtctccctcccacggagcctgtgcatgatgaaaaagcttcgctcgaagcatataattttcggttctgatggcgtcaaaatgatccggtagggatttcatggtcaatgcagtataatagaaatggacgatccgtctccgcatcgtctcttgaacagtttcctgttctttatcgctgagttgatcaaaatttgccggcagcttgacctctggcttagacaatgtctcggataatggatcgccccagttttgaaaatgttcggggattccagcgcataaacagaggggtagaattactgcatgttgccagtcaatgacccctaccatatcattagacgtattcaccaagatattattaggtgaaaagtccggatggcgaagagtcgggcgagacatacggcctgataggacgtcgaggtagggcgctaacttcaaataattggcaaggagatattggtatagaataggcgagaggctttggaactggtatatttctcgtagatatctttcgacgtgtaggcgtggtttactaaatcttttatagaaatctatctcttagtaggtacttcgaagtatatagaaaagatattccctggctcaaagtcaatattactaaagaaataggaactcctagatagagacttacataggctatagttaacctttagagaggcctattctcgatactactatttatactatatagtttagctaataacgatatcgtttaatactgggataaagtgttgtgagctgtcgagatcacggcggtaataaagacttccgcttgctgggaagtggatactcataaaccgtctctccatattaacaatctgtctcattattttgacccgagttttggtatccatagagaaccactggtcacttaaggggattccttcaagcctttcaagtagaatatattcagttctaacgggatttgtctgatctggagaatacgcaaggactttaggggctgggaccccatgagcacgtagatgtgtgagtgtggcagcttcgctagccaccacataatgtttcggaatagtagtcttgtatggcaaccttgcaagaactgcatatccatcattgaaggtgagttgcaagacgcggttgaagcccccctcggcgagttttgtgatcgaggctacgccatcgaggcgtcgaccaacagaatggcaggctgcccttacaagggcatccacgtcaaattgaatacagcgttcagcgcggcggagcttttcattaaatctagtttaacggagcaagttagtttatcgcaattgacgcgttcagcaaccgtcacgactcacaaaaagcgcccagaagtgtactcgaacagatcagaattactactcatagaggacattcttctgggtaatgacttcgggtatcgaccccaaaacctcgagaagcgtcgcattttcaaggagagggccagggtacgcacccagctacatttccaagcttaactttaagttacccgtggacccgccaacatgggtattactcagcactaacgcctcaggtgcccaccgatagacccttgtttccaaggggtcaagtgctgaatcagcatatggccggcctctgtatgttgtgtaacgtgccaggtctaaaagagaacagtgcattcaattcaaaataactaagatggagagaaataagaagcaagttggaaagtgggcagcagccagttaatatagctgaccacttccaagcgttgcaaacctcgaacatctcgttcagctatgtaacaaacaatctatctggtaaacaatgcaaacagtaggcgagcaagcaaacatgaagcatatgatagcgatccatgtggattgtgacatgttgtagttaattattttgcgatgaggaatctagctagaagggccacgctcaagaataaacattgtaaagccctatggattaagaaacacttttggtcttttctaatgaagatacaaaatacaccgatattttctaatgaagatacaaaatacaccgatatcctttcaaatggtcagcgattagaactctatggtacaatatgaggactctcatatgatactcgggccacattgggctaagtattctaagaagttggtaaccaactatctgacgcagaaaggtaggtcaggtcatcagatttagcacgagggatatggtatggacatcaatcgcaccaccattgcactacctgactgattgcagtggcccgtataatagaccaaaagaagacgttcagaccaatcatcactgtagcaggggttcttgcagttgaatggggctgggcaaggctaagctccggaaaatgccttttatcttctattctctgttcattcaatgaaaagcaatatactgtcttcgaaaaacatatgagagtcctagattcatcaaactaaatggatacaagacccagaaggtttcaggcgacgatagccttccttctcatctcttctcctctcctcctccctcttctctttgctgtgttatcaaatgaccattttccttgacgactaggactgccttgtcacagtgagaatggaacttacaaagctttgtaaatgtaggaatagctaactgcccataagccatgcgaagaggccagatgatatttatagggattatgacaggacggcataagttacatatcgatgtagacgaacgaagtaactgggacctgctttgcatcatacacatggtcagtttattatgagttgagttttctaccaccgaaattgtatgctcgtcactacaaagtacacacgtactgcatatatttttatgaagaaagattatttggccgaagatgcatcggaacaaaccttcccgagctctatcgaactatgttgtataataataatcggccaagccaccgaacaaaatttgacgtcggcgctcggttcccgttcgaaaccgtttcaaatagaaacgccccataaggtcctgtaaggcgagacgatcattcacccagccccatttcgaattccgacctttccgacgcagtgaacatcgacgattcttgccacttcgggcattagaccaggacatttgtaggcagcaaaggcatccttcctatacgatgtcggatcggcgagccgtgccgtcacatagcaccgtgaaatactacaagatttgtacattgtacgttgtccctacattgtaagctcagctgtctaccggaagccctcggtccgcaagcggagctaactggaccccgcggcattcgaagcggagactcatgccgggcatgggagtgtggaacaggttatcgtcaaaacgggctgataccgcaataacccaatacgaagtacggagtacggaggaggagaaagccacaacgctcaggggctggatgttgctcggattggcagttgatagcaaaaggtacgttgaatgagggaggtggggactccttatggacacttgtcagatgctctcgcagacaaggcggtccgagatacctaaaaaggactactggtcatgtcgatgtattccaatactcgcttatttagtttcttggcgcgcattgggccgctcggatttccccaaatgcgttgcttcacgagggtgggcttcttggcaagtggcgatccagccttattttttggatgtggatgtcttggctctttcaggggaaagataacgggtcatttttggactcgtttttggtaataccatatttgaattgatggctgttttagtaggacctcggaagtcaagagttgtcacgcctcctttttcccttctggggttaattttcaaagcgagtcatgggacttgagttcatctggggtatttggccatagccgcttgggcaggctgcatcacttacgtgtctagcaagttgggtttcattatcattggttttatacaagtcattcgggtattgattttatgttcatatgtacatccgaaattatccacagtcactgatagttctcggcttcgttgtctccatttcatagagaacagaagccagagagagaaaaatgaaacaccaagaatgatctgagcaaatatgataaaagtatgctgaaaggaaagaatcaaaatgtgaatcatagaaaagaaaatgcaagatatgagaaataaaacagagtgtcatatagacacttgacagaaagcgaagaccgccagggcattgcttcttaagaaatcattccaacgtctttaccaaaacgctccaaaattaagctgtctgcataggaatgctagtcatgggcagctggggcggggcctgctcaccctcctcgaacatccacttctccaatttttgcgccatgcgtgcgcagaaggggtcaacatatccagtccacaaggtggcgcagaagtagaccagcacgatccaagcggggatactgatggccacgacccaaggggcgcggatggggatccagtgcgggtggaggggttcgccgtcctcgccgtatatcgggttgcccttttcgtcgacaatgtcaccgtcccagggctggccggtaatgccgtaaagcatccagcaaagaacagtgcgcaagagagtgccgtgcacgaggtaaacggcgaaactctgcttgccgagccagaggaggagacggctggagaggaattccttggtggagggagagatgtagatggcgaaaattatgaggtcgacgcccaaagcggagtagcgtctgccgacgttgacctccggaggaaagatatagtgagaggcccgttccatgtaggccgaccatgtagcccattctgggtgttctccggggtacgagcacacgaagagaccgaggcagaccaagaggcctgctacgatcttgcgaccccagctgtggcgttcgacgaattctttgaaaccgttctcataagagagatcgctgaggaacatgccgtaaactgcctgcatttggaaggtttctgtctcttgattaggaccaggggtggggatttgggtttcgcgtagaacttaccggtgttcttggctgcgttctggtggaagtagaggtacatgcctacgtagatggccatgcggaatcggaacttgcagaacattgtcgcgcagataaggacgtaaaccagcatagatgcctggagcagcggaagtaaagcccactggtggtcatcgtacgccatatagcccgtggtccaaacttccaggaaggtcttgaacaaccgcacaaactcctcccagaaagtaggtgccagatcgacggcggcgtaacggcaccaccaacagtcggatcgattagcggcgacgaaggcgccaaattgtgccatgacccatgagatgagcaaggcgatagtagcggggaagatgaggcgaggtggacgacggaaggcactcttgcccacggatgtgaaggatccaaggatgtcgccattgcgagactgtttgagcggcttgagggcacaaacgtagccagtcaggaaggcgaagattgtgacacccaaacggccttgccaaggaatacgcaagacgggccactgcagaattcggggaggggagtcaacatcgtcgcggggggcaaagagatcataatcccatccgcgggccaggtgagtgaggataactaggaatgaagcgattcctcggaggccctatccacgatgttagtaacaagcctcatccctataaggctgagatagataacgcacatcaatccacttcacacttttccgcggatcacctttcaccgatggatctgcggacttccagggaatgttgtccaatatgcgcgagtatagatgggtgggctgaatatactccatgatgagtgttgtaaagagtgaatgagaaaccaaacaagtccgacaggagactcggagtgtctagtggattggttgaaatggaaagccaaatgcaaccatcaacatcgaacgacaaagctcacaaaatgccaaacaaaacaaaccaaaatgctgaagattcaaaggagagaggaagggacagagatgaggttagctcaagttactgagagagcctccccatagatcaacgagcgagaagtttcgaaaataaataggccaagacagcagaacggggtatatgtaagagaaagccgaattcatcttccctttcccacgagtcgcggatcttggccaagcggaaaatgggtacgaggcgatcgaatgggcgtgaactggaacttgggggatttaccttgttgtatgtaggtatcgccgtggggcctcggtagtggagccttgaaattaccagttcaatacctgtgaagatggcgaaaatgacgaagtgacgaaagtgaagtaaagtatacgatgcctaaatataactggaggggttgtgccatgttatgtttgcagttatgtaaatgtcgataaatgatactacatcagaaaagagctggatatacgtatattgtatgtatcaatctacaacatagggatgagtattgcctccatagttacagcatatgtacgaatactccgtactcgtacgccatacgccatacgcatacaaacaagggaaggggcgtaaattgaagctatctccagccacgaactaaaccatcttatgtagaagctgacgacgctctgcgcatcaattgagctagtatcccatctgccaatcaacacgctgtattttccccatatgaaccatgggctaaaggccgcctcaaattacgccagatcttggcattgatcccacgcagcccaggtctgcaacctgattggccagggcaatcccaacggcaaatcggaatcggggcttccaattgatttaatttctttttctggaattcgatgcgcactggcgttaacgctataccacttcgattcggagtaaggggatggaatgcaaccttggaagttcacccctatttcttatttccgccaaatacgagaacgagagggcatttcagtcgggtacatcctatgctgtatggatgtatgaatgtatgggtgttgtatatcttctatggatgtgatatggagtacgttgtacaaagcactccatatggagtaagtcatcacgttatctgacactcggactccgtgaagatcgctggtacctcgggaacttttcgaatatcaccgtgaacgcaggaatggtaaataagagccattggattctacagataacaacattccgtccctgggaatgtaccgttgaacttgatttgaaccgaatgaatttgaaacatatattgtaactcaataatttcgtattcaaccaaccaggcggagcaaactcttggcttcagtcttcagactctactccgtactccatagagctcacgagactattgaaaaacgggtctactcaatcacatgacaacgttgaagctggctattttaggtgatattaattacttggtaagcttctcaatcttaatttagttattacaagtcaataaaatagcatagttttactccgaggatacgtaagtggtgcacagcaaaaaaaaaagacctcagccctatcatcttcctgcgactgtgtcccgtacaacatacgtgttagtacgaagtctctttgtctctcggtccttggcgacccatttatttagaaaaccgaaagtctaagcggttttcggtaccccgtagtacatattcatgttatggtacaagatcgtctgccttgtggtcagaggtcggcagccaagagtttcccctgcatgacggggagatatgtgtggtggctgtcgcatttacgcatacggagtatctacgtattaactatctacaacatacacatacatagctaatccgtagtatgttctagaaccggcatattccgcctcgtgtggaccggtacccgcttttcctcaatccaaaaaggtttaagggtctcgggaaattgatcagatagggttctccaggacctccagggctgtcaggtatcatacccagtaatacacgtgacaatacacaggtgcttggcaaagtcgggtggtggcgggccaagatcacgcaattttagtctcaacccgacacatccatttagacccatctgaatttaccccctagttcaggagaacttgatggcttaggggtgtacgggacaagaatatccagaatccacaactttgtcacttccaaaatgcggcttgcacgtacatttacgaccttgctggcagctgtggttgcttcggccaccattctcgagaacggtcaagtgagagagaatgcatatcccggccagttacaaccggtgactttggacgattcatggaggaactatcccgcggatgccccggagatctcttacaaaggtcgatgggatagtcaacacatctcttgtatgttccccgctcctcttccccggattctggttttaaccttaatgctaaccttggaacgaacctcagggtggtcgtatgtatgactcgctattattttgtcggctttactaagtaatgatacagtgcaccgggaatcaaagtcgagttctctggggaaaaggtgcgtcttgtttactccgattaaccttaaaaatggggtccacatcgtaacatcattctagcttgccgtccacttcggcccaagcaccaacacgggtgttctggtggcctaccggtatgcatacatctcactctttatgtattcattgtgctaacccttgacaggattggctctcttgattggcaattctctaatatcaccgcctcctccacatatcaatttgttggtccgtggtcagagctcaaagatggtgatgaacccgtcgacaaaaatgtctttgagatgagaggtgtgtatcccaaattccagtggtaacctatatactaactgcattacagtcacaaattggggcattggataagtctctccctgtcgttcaatctgttcgttacttaccgtccacacagtccaaatcgctggtgttgctgtcgcgaatgacgccgtccttaccaaggccccgaccttcccaaagagagttgagattattgggggctcgtaagtttccacaccttgccagctagtcttccatgcaactaactgtccccaaggcttgcatctggacaatttgccacctacgagacaatctcctcgtggtccttcctcttcgctaacggcttaggaaatgtcgaatacggcatcacggtcagtccgctcccacctggatttctgaattccgaatatgctgacaagtctcgcaggcctatcccggcgtgtgtctcgccgatgaacaatgttacaacggcggctctcgcggtgtagtatgtcatcaacctcccatttcccctagaaaccccatcatcaactaacaacgccactagggatggtactggcaccgtgcctcggacccgggctctcgtgcgcgatcaatctacgaccgcaatcccgagaagtgggacgtcaaggcagagcaaccggccgatcttgtgatcattcagatgggcggtaacgatcatcgccatcccaacgaaatccccggcagggattactaccatgcctacgtcgacttggtcgaggatatccactctaactggcctaatgcaatcatcatcctcatggtatgtacctcttctattcacagcttggtctgtaaatggtccatccgactaacttcaacagtcccaatggggaggattcaccaaggaaggaaagaagtacgtcggtagcacttactaccaggaagagaccagggaagtcaatgagcacttcaaagaccgtggtttcgtctactatttccccaccgagggccttctgcagcataacgatatcaaccccaagaaccatcttacggatgtgggacatgttaagattgcgagtcacttgttgcagtgggttaagttggttctcaggtggaaccttgagcctacgggcgaagtccaatctggaactacctactggaacgatcagcaggaatactgattgttctgagatactgaaattggggccgggtggttatctggcctttgtacatttatttattgatactcggcgcggtgtagataaactgcaagaacatatagagcatatatggcgccttttggcattgtactttttgcgcatttaagtttcctattcgaagtcggttgaatatttattaatatttgaaaggaaggcatattattaggtaaagctcatatatataatatataaccgttgtcgtaatatatcacggggatcctcaaaattattccactttagagaccgttaggaccccataatccatggcggttctacctacccaaaacactcccaattccggtggcgcactctaacgagagagataataggagtgaaagtactatgtactatgcaccgctattacaaactagtgtttatccaaaaagcaaaaaaaaacaaaaagctggggacagagttattggatcgacgtccgtacccaagttgtttgtatgccgctattgattaccgcatctggatacctccaagaatagggcaggagtcatagtcaccaaaataggtaggtatagtaccaaagatattaaagtggtgaaagctatttcgatccaccccgtatcaactcaagcgttgaaatattgcatcaagcggggtagtgtgtgccttgccatctttatccgatctatgaatgtcatccccaggctgtgtgatgtggcttgcatcagtgtttacccaaacaggttaattctccaatttattttcgtggtctttcttcttttcctccgctgagagctccggtgtattcgaaatcagctgcacatgtttatccagtggatagcgccgtaaaagactgactggcacccaacaatacttttgcggtgcacctttcaagaacccttccaagatggccttctccaagctgataggatgcttcaacatccatagcttgattatttcgtagccatatttggacttcttcgtacccgcgttgaattccgtattgccaatcccgccgtcttccggaacctcgcctggaattttccctggggacatgcgagcgacatacgcgatttgcttgacggggagagtggtgtagaaccagatgcggtgaaccttctgcgggagtaggtaaccacgatattcatggttcttcgcgccagacgcgatattgcccatgtgctcgggtttgatgctcatgaagatatctgagctcgattttgccattgcgagactcggcatgaagtgtccaactcaaaggtattagatgatctcttcgtggaattagaaatgtgcagcacagaaaaagctcaaaaggtttgatttggcggtgagtgctctaatccgaggtcagttggtagtctgatcggcgcccctcacagctgagaggatagtcacatttggcctgaacgcggatgaaaaacagactgtggaagagccagaaagtgctaattatccatctcaatttgctttttattgagattatcactgtgaatcagttggtgtttggggaaagcccaagtctccggaattttggccttgcgatgaaatagtcaaatctgtactccatacgagcaccaacacaagcctaacttccaataattcatgcaagtggctttcctctgtgccacgacaatgtttgagtcaggcaagacgacggagaatggtcaaataatagcatgcaccttgacttaggtcattggattgtgaagctggtcggcagcgcttattgtactgagacgtgggcctgaagatgtcatcacgggcggcccggcgcttcttagcgtgtgacgctcctactttgatgatgtgcatggaagttgggccatgggattgcactctttggtgtgtggtgggaaggacgactagggtcccggctcccgatggcctagtctccgaacttcggtccggtcgggatttatgtacatcggcctttctgggtggagatgagagttatgcatagatctgggatatagattgtataaaaagagatcgactgctcttgcaattctcataattctcaagtcgactctaacaaggtatctctacaaatacctaaattcaagactgaattgaatatctcctattcctcctattcctcctatcctttcccatcattttatgcccaatagggcaattgccgaggtatccagaacatttcattcgccaagccctttatgttcttcccaacgatccacatgccataaaaagattggtgctggagatcaaatagtcccaaccgttgttgttcgaccaatgctatatctcctgcaccgggataacttccacattaggcgactggccactggagcagattttcttgtctttcttcttttttttttttaagaacactggcatataacaagaccgggccaacaaagacttcaaacttgtcgcacttttgaagtaaagttagatcaaaactatccccttgcgcaggtattactctgcagcccatactttcacaatggttccaaaacccattccattcccgggcttcaccccgatatctgatcgagtataccttcgcaatggtcacgagaaggccaaaccagctccagccgacgagccaacaacgattatcatttccggctggggcgacggcatgccgaaacacgttaccaaatattccgacggctaccatgagctctacccatccgcgcggatcatcgttatcctatcgactaccttccaggccaccaaccaaccagaggaagccagaatccaggccatgatgccggtcgtcgacaccgtcttccctacgccaaccggcagcggaaacgaaaaggagcgccttctcctgcatgccatgtcaaatacaggcgccattttcactgcctccatcgtcgtcgcgtatcagcgacgctatggaacagacaagccattcccccacgagctcttagtgctggactccacgcctggaagtctggacttcacgtctcaggttacccggtggtcgcgtgccatggcggtcggcacggccaagttcttcccttggcccttcattatcacacatggtctgtggtatgctttcctctgggcgaatttcctgtggcaactcttgagcggttccgtgtcttcgggcgtttgggcggatggaatcataaatgataagtcttgcatcgcggccggttctagcagggtttacctttactctaaggaagatgagattattggttacaaggatttggaggagaatgtcgcccatgccaggacattaggctattcggctgatcttgagatgtttgagggctcgccgcatgtcggtcatatgagacttcatcctgaacaatattggaataaaatttccagctcatggaagcaggccattgcgaaataaggtaccctggggactggatatattgcattttgcatttatatttatagcttagaccatgtttaataattgtatagagcgatttcattgatagtctgattaatatcacttgctagtttccagaacaaggttgatctccgggatgtcgattaagccctgcgatccgctatatcggtacaagacttgtcttaggttatacttgtttatacaaaaggaactggcaagatattcaaaggtagcaattcgtaagtcaatagatcagcactaacaatctgggccttccaaggcaatgcgaaatgagtacacaaagacaacaccacatccactccactctggaggttcaacctaatcacgatcatcaggatggaaaaccaatgctcgcacttcaatactctctcttcccgcttcatgctccgtttccgggttaacaaaagcagtatggggcacacgacgagctcttccatcaaccttggaatcaaaacatttgataagtgtcaccaagtccggagtctgcccatagcggtaataccacttgatattcgggtcgggcttgacggcatatgtctcaccttcgcggtctgggtatatgagcccgatgggaacaaggtcactatctgggactgagtgggcatccgccaccgccaatggatccttcaggatggttttgatcggacgccagacattgatgatctggtatcggcccttgaggagctcgggagcctcgtctgggagatggtgggagactctgtttttggacgcagtgtaggattgatcaatgtgtacgcgctgcacaggtccgcggagctggctagtaatggatctatcagtttgggcccgtcggatggtatggtcgaagatgaagatacgagaggcacccgtgctatgtaggtcattgttagtttcatttgagtgatgttgatggcttcaggagtgcatacgcgtctttaagtagttgttctgtttccgggtaatattctctcttgatcttctcatcgtctaggaagtctttctcttggctttcgtgatagtaaagctggaatccatggctgtctagcttgtagtccagctcatggccactgatatcgtggatggtggtcacgagaggaaccaccggtcgatcataagtctctggtttgccaacataagatggtgccgggggagagccatcttcgttctctttgtagaagttgagtgtagcctggacatggtgaggcttttcggagactgggactctggggttttctgagagcagagagccgtgagaaccaggaagttgaacagctgcagaagccatagtgagttatttgcgttgtaatttaatggagcttggaacagatgacttcgatagatggttctttatatagcagtttgcggggtgagttctatttgtcagaatacagcacgcaatattcgtatgacatggagaaatgctgataaatgcatagctttgagggatacaagaatcaagtcgactggtaagccctgcagtagtaccagatggtacagatggaattatattattaattgacgtgcatatgccatttgtaatctcgcattccccggaagatcatttggtgattgagatgacgccactcgatatcgaatatacgaaaaacggcattggccaaatttaaccaagcattcattctaatgtagttgattgcatttctttctgggtaggcacagggtagatgtgatatgaaaccaacaatagtgcgctcctatgaagcccatctagtaatcacgtggtttatactcccatgagatgtgttaaaagatattaagtaaacagcataaaccacactctgcagttatagaggacttgtctttctatagatatttatcgctaatcttcctcgaagttatagaaatcgacctagcatggccaccaaggtcctccgcccaacaaagtcaaaagcaacgccgtctttcccctcctcggcagtctttcacccgcatcagatcacagcctcagcttttaataaatccaagcgggggctaataggatcactttatatttaagcaagcatccctagagtcttggtctattttaaaatccctgtgcttcatattatccaaccccatcaccatggcagtcatccaagcaaaatggaccaaagtcgtcgaggctgaggtcttacagcgatcgtcccaagtagtctccgtcattgacggacaggtttacatctttggcggggagttgcggccacgggagccgagagacaataacgttcacattgtttcacttggacgtcgtgagtctccctatttctacaaaaaaatcccaaatctgatgccagcgcatacaactaacagatcccatagccgcaaccctatctaccaagccatccaccgacaaatccccttcgccgcgagtcgggaccgcctcggcaaccctcaatggcaaaatctacctattctccggacgcgggggcgcagcaatggcaccggtagaagaaagtggcgctatttgggaattcaaccccgcctcagacgaatggtcactcctatcaccatccgacgcaaacccgtcctctatcccggcagcgcgcagctaccactgcacagccagcgacggcaaagacaccgtgtttatccacgcgggctgtccggagaagggccgtctatcggatctgtgggcattcagtgtatcccagaagcagtggacggaacttgcttcggcgccggatccaccacgcggtggaacctctattgcatttgcccagggtaggttgtatcggatgaatgggtttgatggggagcgggaacagggtggcagagtagatgtgtatgagcctgaaaccaatctgtggagctcgcactcgtttgtttcagatggtatggctggaccatcgccgcgaagtgtggcagccttgcttcctgttgttgtttctggccgtgtgtacttggtcactctgtttggtgagcaggatcctagttccttaggacatcagggtgccggaaaaatgttgggtgatgtgtggttatttgatgtagagacccagctatggaccaaggttgaggctcagggagatgagcgcccagacccacggggttggttcgatggcgatgtccttggtaatggcagtattgtggttcatgggggacttggagaatcaaataatcgactgggcgacctttggactctcgagtttgtctaatgttttgaagagatttagtttttcaagagaaaatcccgagggtattcaacatcaacaaaaaatgaaatttgtaggagaattatggagttttgaaaagaaaagaacaaagctaagagaaggttatgcgtcatgagcgtacagcgaaagcacaacaagtcaaaaggaaatcgtttgtgcgtgctatgaggtcttgaatcgtacagttgccatatttgcctgcgccattccgcaacaattcataagaaaagataatttgacagagcgaaagaaaagtcaacgagtcgcaccatacaccagcaccatgaggggaagtccggcggaaggaaatgaacaaaaagagtcaatgactgtcatcgcaaatcggaagcaaaaaaaaaggagaattgacatgaaacaggagaaagacctcggaaagacaaataaaaaaagtgtagtagttattgtgacaactgacatcatgcacaggagaagtgaaaaatgttctgcgttagagttctactcgtttttggagtattgcttagaacatgagagagcgggttttctgccgacgtgcttcgacagtacccatctcgggttgagaatgagtgtgcttgtgtcgaggacgtgaggattgaggcgccggcgccccagaccccgcagaagatggaggaggtgccatcatcgcactgttccggctccgaacaggagatggcagtgaggcaggtgctgtgggaatcccagtgggcggacgacgaggcgcagtctcattgctggctttcatgctacgctcacgcttgagcacaagatcagcccagggtttgagtgcaccattgccggagctagagcccttcccaacagcttcagacatgactcgaagccagccctccttatctgcggggctatccgcatagaagtcaatcacttcaccattaccaaaacggatgcggaatccctcttcaacaaacatgtagccatcctcttcttcggcgaatgcagacttgcgacgggtaccgcccttcgtgttggtctccttttgaagtaaagaggatcgatcgtcaatgagcttggaggccttggctagattaatggtagcacgaggttggcgcgttgtttcgtggaaggccgttaacttggatccttgaagcttaaagaagcgacggcgccagtactattgtgatggattagttttaaatcgacgatagaagacttcgtaagcacttacaggacaatctccgccctgttgggaaaggaacccttcccagcagcgagctgcaacactctctgcatcgcgcaattcacgaatacaggcattcatgctcttcggcatgtcttcatccttgctacctttcggcttaggcacgaatagaagttgcacttccaactttccaatcttataaggtggtcgacgctgcgtattaatgctagtcgcactcttcttgctcttgatgctgctcatctgttcctcaacggcccattcgttgaagcaagcaacatcaacaatgtggggacggccaaacgcctgctgctcgtggtcgcttaaagccacataagcgcggccaaagctaccatcacgtgcaaccaagtttcgaagccgttcgtatacgggagcattaacgtccttggccttctgttgctgcgactgcatttgttgcttaatgtcaagctccttgcgccgacgtggggatgcaaatacacggctgagggccgacgccttttggcgtgatggcgatgatgcgggttcttgggtttggaatttgctctcgtcaatcttcatttgcaaggtcaactggaactcaaggtcattctggacgatgagctcgaactcttgtccgattggagctgacttgcccatctccaaccaggaggtggtcacacagtgcagtccgttatccagggtcagtgcaaaatacgatcgttcacctacagttcggttagtgacagtcaattgcagtgggtactatgatagggtcttaccccgtgggagaggaaggtcacaatatttgaggcctatgaccttcacaaataaacgacctcgctcttctccatcttcaaacgattcggagatggttggctcgttctcttcaatggtggcgggagcttcctgaacattgctgggctgtccagggagaggtgggactccacctatgccagggacgggctttttcttcgggataccggtggcagacttgatacttgggcgtcgcgctgagccattccaagggactgtggtccaggtctgttggcttgccttgcgtggagaagatccagcggagcgtgtaccgtgcggatcttgggcagtgtgttcggcagaaggcattgcttcttcctcgttacggctgctggcaatgatgactttcgtgttctgtctcatgaggtatcctctctgtttgggggtaggagagtcagcggggtgtgcactaattcctggggtcgcgggatccttgtgtcctattgcctgggaaggcagtaaggaactagggctttgggaaagggcaaggtggaatgcaaccttttgggattcaatgacacgatcaaactccttgtccagtccaaatccaaggctttcttcctggatactgaagggaatatcgagtttcaaacaactactttgtcgctgggcaagagctgcgggccccagctttggtggcaagtcaatattttcatgttcgggatccgacgagtttgagtcgttggagatctgcttagtcaatgaaggagtgggtagagcgtgttggccactgatctgacggcgggtggcagccatcgactggatatccgcaggggtcagtgagggcctggtcttgaggccagcaccaggagctcggattgttgcgacagggtcaggaacagactcatcggatgagctctcatcatgttccggctctaactcctcttccccctctgcatcttcctcttcctgttcttcttcttcttcgtcgtcgtcctattcttcgtcctcttcgtcattgtcgtgttcgatcggatgacgaatgacagagtctggagtagacgcttcggaagcttggtcctggtgcatctcgggggtaagagggcgtgcgagagactgacggatagatgccatatcgaaggactggttttgaggggcgtttggctctttgtattcctgggcaccctcgtttggctgtgcgggcttttcggcgtcggtgtgggtttcagcattgggggtagtctgtccagattcttgttcatggctatcatgcccagcgtgttcgcgatcggcggcttcggcagcagagcgtagcgagtaattgctggcctcatcgtacttggcccgttggtcacgggatgacaagctgttgtctgacctgctctggtaataatccgtaatagagtaaaggtcttcatctcgctcttcctctttaatgattacacttgaggagtcatcatcgtcggtctccgtggatggaatgggaacatcagggtcataatggtcataacgttgggggctggaagcaatttgagaagaggcatctgagctgtcatcctcataactatcacctttgcggattccccgcaagattgagtcgcgagaaatgcgaggtggagaaaagaagttatccttggcatcatctgcgtaagtatcatctttcgatgcaagcgtttcatctgctctaggaagctccaaggtttcctcgatactctcggcgtgctcatcatgtgtctcatcatcatctctctcttgcagcatcatgagacggagtctctcctctatggacccagcgccggggatatcagactttgtatatgcggcaggagctggaggcgtagggagcacacgctgtcccgcgctgccgatctcaaaagcggcagcgagcttatcagcagaggacggacgcgcgccagacatgcgattgaccgatggcaaaggcgggaggggacgtcgctcgccatttgagtccagcgactcgacgcgtgtgtgctgagaagatcctccttcacgtgaaataggtcgctcatcggcgctgtcttcttcgacgtcttcgatgaaaggatcgctatcactgtttgttgggctcataaaacgccagtcttcgggcaacacaacaggagttttctcagcatcttccagcgaggcgtcaaagctatcatcacgctcaatcgatgactcggcctcaaaactaagatccccctcttcttcggactcgtagctgttctcacgtgactcagatgcaactgaggagagatccggtgtcgtcatttcatattcgttgatttgagggggggcgtgatcaaaagtgacactctttgcatgtcgatgtccagcactgccatattcggaccaaatatcgttctggggatcgaatcccttgccataccgactacctttcgatagcgaggacttgcttggcgatgcttggtctttgctcgaggatgacgggcgagacatttggctggtatcttcgtcgacttgggatttcgtaacattcatttggctgttccgttgcggagaccgctgcgagcctaatggtctctggggaaagaccaccgaagccgggtcatattcttgaccaccttcgaagaacttgttgttatttttgaccttcgacacgcgtttcaagttttcgagcgacgggcgctttgaggggaaataacacccctctggatcgtatggcgctttattctcggctccctttgggaacggcgatggggagtcccgacctttccaaaacaggcgaggggaggcattgttattcagagacgagacatcatatgcaggcgattcgccgtgtggcatctgctaggttgttagcatgcttgaccacatgcaaagcatcgcgttgacagtaccttggtaacttgattccagctaggcgaattgcgcctctgggccatggggctcacttcggagagtggccgttgaccaggtcccttagccatattgacgttgggtttgctggtgactcaggatgcgaagtgtgcaatcgtaaaacaagactaagacaggtgtctataatgtgtcagtgtttattcaccaagtcctgatcagcgaatgggttcacgactgatgacgaaggacataaggcaaacttgcccagagatcaggtaccatacgtttttaataaccaggagtcgcgtgggaaatagttgccagcgagtgctgatatattcgctgcaaaggcgtaaaggccgtgtcgatcgtggcaagaatgctgcggcaaagcgaaggtaccaaaacaaacccaagttgggtgtctaggtgtcaaaccaaggccgaaaaaaaggggaagggataacgaagggatacgaatgcaaactcccaaaaagaaaaaaaaatagcagggaagagcgacagagacaaagaaagaggttattcagaagagtagcagaaacaacgaagcttgatatgtctctcccatggattcaagtggattgttaccccaagcaagaaactgttgttgcgggagtcgtcatggcaacggcgcgattgtttcagcatcccgtgacattgcgtcaggtgcctccgatcggcgctagcctacaagtagaatagcctcgcggatcgttttcgatgtcaacatgcacctaccaccttcaactgttaaaagtacctaaatatagcacaagattgaatatgtaggaaaactcgaatttgggtatcggagtttcttatagagtcccactattcaaatgtgaagcacagctagaatttgatgtattgtttcctctttctaacaagtcaccatcgattatatgtcaagacaaccttgtaatatgtgtgaggtttgaatggcagcaaatatcttcaccaatagggtaggcatggagggctttaaaatagggaaggtatatctgtagagctcaatccaaggcaggagttactagagactcccaaggtgcaggcaaagctcacacgcatatatgaacttagacgaaaacaaaagccacgacaggccacttccttgtcaacctctctagcatccaccagactatagtggctttgaggtctgtagtagcatgctgaatccggatatatgaactcacccgagagcaagccgcgggggtgagtccgctcttaatatgtaggaatttggatggatccaggcaactatatattccgtagttatagatatgatttacctacaaataatttctctcagcaatatgacagattaccttgagctattggttttagtttctgagacgaatagtcgcacagatttagcacaacagaaaatatgagaagtgttggattactgagaccaccagtattgcaaacaaacatcaacaaacatgtttatgatgtactgagtcagcattttagtcacctgaccatatgccaaagtttgtgatctgcgctagtctgaaaaaggaatggcgttttatcatcgcggaaaaaaaacatctgaacctgttctggcctttccttttcgatcattcagcgttttccacttccgcgcatcttatcggttttaattaggtagaatgcctctgccagctcgctcttcgatatgttttctatgtcaaactaaggcgaccctgcttaccccgtcgattcttccgacgtcatggcagaccacacgaggcatggccaccgttcgattgcgtcgcaaggctgctcggatggccctgtcgcccactgtttccaaaccatctcttccatctcctaacaagccacgacgggaacgggccggtccctttgcctcgatgaaccagacccaggcacggattcgagacacaccacgcacacgatcacaggcggccctcaagcgttcaggggaggagggcaagatggaaaagaaggagagcccattgtacagagctttgaagatgcagacaacgttgacagctgtgccttatggtcgacgttccgctattaaagctcgacttgccgacatcactagtttcgaccacttccctctccttcccgcagttcgacagtcaatattcggccaggctctggccggtctaactgatgttacccccacacccattcaaagactcgcgattcccgaattgttactagatgaatccaagaagaagaagaaagtgaacaaggcgaatgaagatgaagaagaatacaattttgaccagtatctcctggcagcagagaccggttcgggaaagactctcgcatacttgcttccaattgttgatgctatcaagcgtgctgaagtcctcgatatagaggaggagaaagtcctcgaggaacaaaaggcgcgagagcgggaggagagaatgaagaacaaggcgttcgatctggatcccgaggagccgccaatgacaaacgccgctcgtcctcgggctatcatcctcgttcctacctccgaattggtatctcaagttggatcgcagctcaaggagttggcccatactgtcaagtaccgctctggcgaaatctcatcaactttcactccccgccgcatcaagaacaccctattccaccccgccggcatcgatattctagtttcaactcctcaccttttgagctctgttgcgaggtcgaatcccaatatcctcagccgagtcactcaccttgtactcgacgaggccgactccttaatggaccgctcgttcatcccgacaacgtccgaaatcattgccaaggttgctccgtcactcaaaaagttgattctctgctccgccaccatcccccgcagtctcgacaaccagctgcgcaagcgcttccctgatctgcaacgcctgacgaccccgaacctacacgccattcctcgtcgcgtacagctaggtgtcgttgacattgagaaggagccataccgcggaaatcgaaaccttgcctgtgctgatgtcatctggtcaatcggcaaggcaggagatagacacgaacacaccgagacatggggaccgctcaatgcgtacatggagccgaaggttaagaagattatcgtgttcgtcaacgaacgtgaggaagccgatgaggtcgctagtttcctgcaatccaagggcatcgatgctgtctcgctatctcgcgacaccgattcccggaagcaacaagagaccctctcgcagttcacagaggttaagcttccaccgactgcggaggagatcatgattaataagaagaagaaccgcgccgccggaagcattcccttcgaacttcctgagcgccaagagcccattcgccgccttcccgacacaaaggttcttgtcactaccgatatcgcctcccgtggtattgataccctggcagtgaagacagtaattctctaccatgtgccgcacactaccatcgactttatccaccgactaggccgtctcggtcgtatgggcaagcgtggtcgtggtgttgtcctggtgggcaagaaggaccgtaaggacgttgtccgtgaggttcgcgagggcatgttccgtggccaggctttgatctagatccagatccagactcacgcgtgcgtgcatttatcacattgtataaatcttgtaacatacatggcgttgatttgaggttttgattttttggggaattggaaaacgactatacccattgtcgcgatagtcattggatctttgaaagtatgtacgatatgcaatcatatatgatgaacctaattctcctcttatataacgacgtctgagtccaattgcattgaaacaactgtaaacgaatattttcattataacctcacacgggtatttcccgcgccacccttcgccagaagtcacatctcttcttcaactggatcagcttcacgttctcaagcctatcacccacaacgacgaattcctcgtctgtatgtagttctggcacacctggctgcgaagcgttcgtcaccttgtgtgcattcgggtctcccgtctggaaaaaactcgcgaaagcccccgcgtagccttcataaacgacagggttagtctcttgaacagtgttgattttgttccactggtatcaatcaagtcaatctatgccatcgacactaggaaagcctccagaaaaagagagcgcaacgataaaaaggacgaacatacataaatagtatcactcccatgggttgctggggaaatcgtatattccccaagataccctttctccgtcgcagccgacgcaatccaataagctggacaagcaagcacaacgtcccgataaaccaaaccagcccgaatataagtattattataactgtcaatcgtctcggtactcccttcagcgggataatatatagatttcacctcatcaatctgcttagccgacaacccaggcacgaaactggaaatccaccggtgaaagctgctgacagaggaatcaaacccatcgaataaaacggcgctgtcaagacccggaggaacgaagttctcaccctcgtggctgttgtacattccccagacaaactctgtgttcagggagcccatgctcacagtttctgtgagagtctcgacaaggaaggtcccgtctataacaggcgcccaggtgtaagaactcgttgtccaagtgttgctcgctccgatgatcaggcttgcgtcacggattttctggatgtcaacagatttgagacaggcgaatatctcatcagcgtggttgtagctggcacagcctgttagattcgccagctgggtgtagattgcttctgcctcgggtgcattgtatttataggtctttggccagaacggcgagctagcaagggcttttgagaatagtttcggttggccatggcggccgtttgcgaggacttgcgccactaccgagccggcaccggctgactggccccatattgtcacgttgtgagggttgccgccgaaatggccgatgtacctccggacccatttcaagacatattgctggtctaataggcccgggtttagatctgaggtcgacgagtctttgattgccttgccgggtagaaacccgaaggcattgacgcgatagttggagtagataacgatgtagtcgttaatattgctgacattgaggatcgggtatgaggatggtggcatggtgaatgccgcgctgccttgaatgaaagcaccgccgtaaaatacaaccagcactggtctgctaatatccttggctagatcccatggccgtgagaatagtcccaggtagagacagtcttcggtgccgttgaccgtccgctgggggcacatgtcgaagtcctggtctgtatcatataggtctccggtgatctttagcggtggctgaggcgcacgaaagcggttctcccctgttggtggtgcagcaaatgggattttgcgaaaataggagaggttgtaggtactgtcatattgacccttgaaggatccgtagtcgagggaaactagagggttgtcccatgcagtgctgactgtgaccataaggccgaggagaagcgtgataacctcattggagaacctcatcttcggttagagcggttttcgttctagagttattgttctattcatctgccatctactgcgtttagcctgggggccatatatagccttcccgagccatcgcatttgataagaggaatcactttcggcagaggaaaccccgagcttctttgtggctctcgagcaattcggtcgacactctcgggcttggctgcgagagagcagctcattggtgcagttattgttgatgcccggaatgaaatgtggggatttgtgcagtcgttgtcaattcggactcgatcaccccggtagtgagaagaaaaccgtagttagctaacaaatcccgaggacacctaactagttatatttatattcaacaccaggtccacaattagtgtgtcaaaacgcagctgtcaagggagtccccggggaataaagcccaagtaaacattgccccctccagaatccaaccctgaaaatgcatcattgcaagaaatcaaaactccagatccaatttccatgcaatataatgccaattaaaccaagtattatcacaaatgcccattcttctaaaccaaaactccgtcctcgcccgtcttgcctcgtaaattgcacaggggctccaaggctgtacagttaaaacgccatacgaagttctctagtacgacgccgacttgcccgagcatcgcggtgagactcagttgaatcactgatttccctttctggggtgtttgtgtcagacagctcgggggtgggggtaatcccaaaactcacgccgcggtctcggcgacagatacgtgattgtgcgtcgggggacaaaaaacgatggacagtgcggtgatccattactcgatcctcaccatccgggcttttgtccgttgatggccactggtatccgtagagcttggaatgacgttcgcagcgcggacattcacgtcgcgtgaggtatgagtttgactggaggaaccatgtatcacaggtctggcactccacccagcggtcgtacttctgggcaagcaatcgtgatgtcttggtatagtctccagggactcgagcaacctgtgactcggtctcgacggagtccatgatgaatcgccgcttggtgcgaggctttcgctttttaggcttattcacaatggtgccgtgggcgtcatctaatttggtggaatttgataagtctgacaatccttcttcggggtcaatgtccatggagtgggtggtgacgggctgaccttcaggagagacatcgggatgatcctcactgttgagcgctttcgactcagacggttctaatatagtttcttctgtcttgatcttggttcccatgtcgtcctcagttgtagctgacgtcgacgagcggtgaggttgatcggctgtggagtttggagattcgcagtctgtggggatagtagaattagtgctattcgtcccgtttcgatcggcttgggcagccacgcttggttcccctgtgacaaccgaaatgaagggttgtgaattagttggcgatgtcattgcggttcgctctatgatctctttcttcggctcggacacctgggctacagcttccgtcagaagagtagctggaatcagtacagtgtccgggatagggatgtcatctgatccgggcgttggttccgcagtaagttcggaaactgagatcccttctcgcaacttagaaacttgtcgttggaattttgcacgtttgcgcggggtggaagaagccaaggtagaggagctgtcggattcctccacatccgagctgcgtccacgcttcctgctcgcattgctgtcttcactcggtgtatcttcagacacggggctggcctctttgctgtttgtctccgtatcaacatgtgaagaccagccattccgtacagcgatttcgcaagtatgacataggcactcgcagttgtcaacgccaaagtaatcctctccgtaggaaactgtgatctcttccccctcgtggatgtcgcgcatggctacgacagacatgccctcattgcccctggttgtcaagctgccgttggcatcacaatcatgattggcaaaacgagcaggacccaaaaagaacgacggagctttacggcgactcgacatcacgatgctgaagtctttgcgggtcaagccgagatccaactcttcttcatgggtcatagacacaagcgttccgctcaggtgtttgatctcctcgccctttttaataaacctgcgagcgcagatcgctgcttcatgttgcgtgataatgtatcgattggtcgtagtgacctcgaacggacagtctggaagatacatctgaatatacttgcggaggtgtcggcggaaccactccttctctcgagggctacggaggtttgccacatatttctttaagcccgagatttccaacaacttgcgttcagccgtcgggatgtccttgtcaacaatgacattgtggagaagaatgcgcccaatatcgtcatcgtggattccgcgggcagggctgtatttcgtgcggttcttgcgggtagtggtccagaaataagcctgccagtagcaagtattagtggacagatatctatgttgaattgtaggcaaataacatacgtgatccactagcgcatccgttgcgacatcgtcatagctggccagcttagccaaggtcaagcgctcgcgacgttcagcggcgggcgagccccttcgcgctctctttggaggcatcatggacgtaagaagaagccgaagaccgctaattatgaaagcgggagagaagaggtcggctcatagaatgcagagcggctgcaaaggtaattgggggaacagtggagggcagaggtccgagggatggggtcgaaaaaaggttcgaagcgcaagaaagtaattaaaatgagtgactgacaatcaacaaaacgaacattatcaagtgattgtcaccattgaggctgttccaaggagaaaggactccctcgcggatgttttttaggggtggaacgggagtgccagctgagacttgccgttctctcgacttttactcttccgccttcccccttgacgtgtcgctttttttttttctctgcggtaattggatatgaagtaattgatcaatggagtatttcagtacgggggttgtttcgacttgattttacgcgctcagctcgcatacaacaggatgatccaatccttgcccctgcggtatcatcacaattgcacccaaaataatcttccagatcaagtgatcattgtttttcagtcttgttcatagaatgtattgtatattatccttcgatgggtattgactgtataataccagccaatctgctgaagaattcaatggatccaactatgaacatgggatgctctctttcgtgggctttttaaggaataacccgatggcttctcgagcttaggtttttctctgtgtccctcggagtatataaaagtcaaccttcaaagaagacaaaacaaggactataaagatctgaatgcgggatgttgctgaactataaaagtagttggttgatgtcgtatggattgaattaagaaaatcccacgtagggtgttgcttgaagtcagaatagatactccatatgattactatactaaacagctcagggtacttatgttatgaacaagcggcgcttcttgtgcttgcttacgacattaggacatacccatggctgatatatattggagaatcaaacgacagccttttatgagcacaagctcaaattagtctgatatttgcaaaaaatgaatagttgcgcgattccattctaattccattcccaggaaatccaactcgaagtcctaataaccaactactccgtagtatattgtataaaagcccggataaacctactccccggcgaaacctccctccggcccgcgagaacaaattgcggacaagcacttatctccagaccgagtaccaaaacacaatgattcaattaaaggtacgcatgcgatgctccttagtggctcaaacgatactaacaccagctccgccagacactattaagttgcatcgacaattccggcgcctcgatcgtcgagtgcgtgaacgtcctgaagaagaagcggcccgcgacaatcggtcagtctccatggcactcagatctagcaacacagcaagaagggatctgggaattaaagctgacattgtgattggttatctaggtgaccggatagtcgtcgtcgttcagaagcagcgatctgcaggctccgaagccaccaccgctgccgcgctcgccaataaggtccgccgaggtgatattcgtcatgccgttgttgttcgcgtgaagaaggaattgcagcggcctgatgggtcccttgtccggtttggtgataatgcttgtgtactggtcaacaagtccggagatcccattgggacgagactgaacggtaagtgcccatcggggagtctcaagataacggctgtctccaggttttcgatactgatatctctacaggtgtggtgggacaagagctacggaagaagcagtggtccaagatcttgtcattggcgccgatccatgtttagtattttcaagtttctacatttgttggaaagcgctctttgtttctttgattgtacttcaatctgtatgtattcctagttgatggcatcagtttcaccccctgttcctaaatatccacgaattttcatcctgttcctgctccaaaatgttcgccgaactcctatgatatcgccaaaaaaaaaacgacaaaaacaaaatctcaagggtatctcggaaatggagactgcattacagaaatgcaaagatcacatgtagacttgtccgcacgcacaacatacgtagtagagtttctgagtagatagaagcaggagtcagcgcatggtttatatcagagggtcagggatccatcaaaggataacttctcaccattcccgtttcggcggatcgttgttgtgactggaaaaagacggcttcggtttcgccacagcttgggcagagcttgttggcccgtggaagctgcaaatcccagggtgttagcgtatggatgctcaaaaaaaggtacagagctggggtagatgcccgaggcttgatttcagagggctccaggctgtcacccacaggcggtgcatcctcaaggagatcctcgtccggggcggaaccgcagatcgaacaagcataatatcaccgcatagggtaaaaaaaccaggaggacgaaccgtggggtcagatgtcacgtcctgggtgacaccggcagtgtcaccgacttggctatggagatggttttggtagacacagtgcgaggaggcaggctcgccgacatggcaggtacggcacgtgaacatcaatcggttgttgacgcgatcttccttggggtagagcaggttggagctgttgaaaagtcagtaagatgtcctcgaatgtgtaaaggttcccatagaaatgactttgagttgaggacttgtggataggcttaccattcacggcagaacttgaaatggattcgatccgacggcttagtctcgccaccagccgtggaagaagggctggcagacatgctgcgcaggtggatcgcaaaatgctagacgtgctgtattgagggtcgagacgcagagtggtcttagatgtgggaatgaggaaaggaagaaatgaaatcacgtggaaatcacgtgttttgtggatggtgaggtgtgaattcgcctgccccgtagttaactaactactccgtaactaatacagagtactccgtagctaattccgtgtatatgactcacctcaacctagcgcattgtcggccttccaaggttggaataaaagagtcaacaatgaacctaccaattacatcgctttgtctattaacaggcccaggcatgacaggattgatatcgaattacgtataaataagcaatatactgacgtacaggtattaggacctacattgtagctcgtctttattattgcgagctcccctataactacgtaatgtattattgatgtagatagttgtcatagatggtgatcggtcaaactgggaagcgggagagctaaagcttggacatgtttgtgtggtttgcaactgttcaccccgcagtttccgttcacttataactgactatatcgttttatcgtttacactaaatccgttggagtgttattgatctgtacattattatttactcagaaaattatcagaatcttttagatccgattgcaaaatggtaggatcagttcatccctttgaaagtttgcatagctgactcttcgacctaggccgacacaggtcttcctaccggttgggaagttcgccattccaactctaagaatctcccatactacttcaacccttccacaaaagagtctcgctgggaaccacctgcggaaactgataccgataagctgaaagtctatatggcgcaaaaccacaccccggctgctcgctctgatccctctggcgagggtgagggcaagatccgctgcagccatttgctcgtcaagcatcgcgatagccgccgtcccagcagctggagggaggctgatattactcgcacaaaggaggaggcgattgaaattcttaagggtcacgagcagcgcattcagtctggagaaatcactcttggtgacctggcagtcgctgagtccgactgcagcagtgcccggaagaagggtgatttgtgagtttcttaattgacctatgtgcaggtgtcttgctaactccttaaaggggtttctttggccgcggcgagatgcagaaggagtttgaagatgccgcttttggcctacagcctggcgaagtcagcagcatcattgagacagcatccggggttcaccttattgaacggtaggttcacccacgggagtgaagtgaaaatggctaataaaggttctcggtctccagtgtccaataatcgcatgctcccgcctatgtcttggtcaattccatagcgaaaattccgatcgcatcaatgcgttgcaaaccctggtctcacttggaataatcttcataagaaataaaagtacaatgaatgaaatgccatctttgttctcttctgacttatgagtgtcttgtgtcctgtctcgggtaggaccaatcaagtagcagaacccgcgacagccttttattccagaaagatgccaatgtatcgttttgaagatgatgtctccaaatgcccagaatttgtgaaagaagatctgtatcacaacagggctatgaagtttgtcgtttctttggatccaagaaacagagtgaaactcgaaaatgtgcctgatatcatacctaatccctaagtctaaagtagactctgccttaggctaacaatggcacttttaggcttagtagctatgatcaacggaaggttccatggttggaaagggaagttgagaattaaaataagctgtataccgtcgatgtcagaataagatgtcaaaggtcattgagcgcaagcaaaacactgctcttacagacgagacatctcccagtttcatctacttttcttccaccatatttcctgtcactctttccttcttccttctcacccacaatctctctttaccacttccccccaacaatcttttctcatacagccaccaactatgagcaaccccactctcaaactccgccagaagcggtccatgatgcgccttcttaatgaaggccgctcgattctcgagtataagttcgacccaagcgccttcgtcgtcccccggtggattttagtgccccacgaggtgcgcaatgccatggtcgccctccagtacaaagctatggtagccgtatatggcatgaagagcctcatggtcacccgcgaccaccgctacttcaagttatgccccaaaagcacaggccccattatctaccagctccatcaatcctccatgcatcgtctcctggaatggaaggaggattggagtttcgccaacccgacccttgcagccgctgccaaaatccctcgtgatgtcctgcagttctgcgttgactcaatcgcctacggaaagtttacctgtgattacaccaacaagattgacggttttatgtctggtgctttccagagttggcgccagcttcgcatagagattgagcatctggccttccgtctcatgagccataaaccgcacgagtacaataagtggcttgtctggtgggagggcaagtttgctgatgacatgtggagatgggaggtttgcctcgagggcttgattctgcccacctgggaggagatcatcgatgatgtctacctcatgatcaacgatcgagttgaggatgcccaggatctggccaacacattctacgtcagcaccccgggactcgcttcgaccgggctctgatcacctgggctttgactttctgcaatgatgattaatgaatatctcaacaattacgacaaatattggtctgggtcggcgctagtatggagcggcctgctgtgaatgagggcactagaaataaccgggagttttgatttgattttttttccttcttgaaatacaacaaactacagaaaatgtatcctacgatggattgtgacaactaagggcaaatgcaccatggtggacttggctctgcaacacacttctttcctgactttctgttacttgagattattacaagaagctactcaaataataagcacccaattatctgatataattgctcaatgaaagaaagtaaaacatttgatttgcctgtcaatggtcacgtgtgcgttcgaaccctatcaatagtagcagccctatgggggaacaaagtaagtaggtgccttgttattgttcgttttctgcaaaagcaataagacaaataaactagacaagggaaggccaaccaaaaagaagataaacccggagtcgaaccggaacagtccaggtagtggatcttcggcacttccctcgaagtgcacatgcaaatcatgttaccagtaactgttgagtcctcagtctgagctttatattccctttctctctcaattttcaaagtttatttgtgtacacacagcactggctaaagaaacccttggaaggaaaggacagagagagcgaccaagtccaagcccacagaaacacatggtctttgtgcaatttgtgatggtactgattcttttctttcttgtgaagagtacctcgatgaaggaattcccgacaaggaagatttcagttccggaaacgaagaaggatgatctattgtgggcctctcctttaggtctaaacgcctgaccaaaagctcggaggaccgatcattgctgttttatggcttagtgcaggagaggagcactacccaacaggacaatacgagatatatgaggggcggaccggaagatattgtcaaacatgttattatgttatagactgggccagtttctaagaagtattttgttctagtgaaattcacttattatttaggggtcattccagcgaacagcgtcacattattgcgtagatgggaacaggatgaagtggtgttgacccatgaaaaagagcagccgcctgaggatatctaaatcaaccaggaggaatggagatataggccacaattgagatgttgtaacctttaacggcttagatctagctgaggacaacctgaggttcagggtttaaaattcgaacagtggctcgtctcacgagccttgtgaattaatgcgtaataacatactccgtcaatgtgaaaaactacatcccccgacaacatgcagagtagacagctcacagactcgtgttcaatcgttccaaacgtgaggtaatcgcgtcaataacagcggatcttgaagaacgttagtcattgattcattaataggagaataagagaggcaactcactctcgttcgaccatcctcatcgcatctgcaaccttagcccgttgcagtcgttggggcaccttaggcgggcccccaggagaggacggggttccaagttccggagagggcaatttgcccgcgacagacttggtctgggccataagatccagagcaagtcgtttaacctagatgaaatgtgagttttgctatggcgaatgcaagaaagataaaacttacagtctccaaccgcgagatcaatggctgatcctcctcttgctcttcgccttgctgtaaggatgcagacaatgtcttcacctcaattatccatgccttctccctctcactcagaggacgacctccagaatttaggaccttcgtgcgtagtgcctcatatcgtcggttcagttcactttgcttgttctgggcggcttgcaatcttttatccagcgcttctccatttcgtactccctccttgcgatgcccatcttccccaatctcactcgtgacacccttgacacgctctgcaacgtctgcaagctgcttcaattggtcctgcatctcgccctgcagccgctcacagcggcggaataaatccgaagcagctcgctcaagagcattggtatgagcagatagcacgcgatgcgcagtggccacaagatccaatgtcgcaggagacaggcgaacttgctccttgagcgtatggcgttgccgatgcgggacatgcttctcgacgaaagaatccagcggagagttggcatagaaaatggcgggaacctgatacggggcccggctcggcgacaaaagaagcgagcctggcgctgaggctctgggctcatacagtgatttgtctagtgccaaggagagagaatcttctggtgtatccattacaactgcataagggttagatggatggtaggtgaggagcaagtagccaatgtcaaagtcatagaaaacaagagacgtggcaagatgttcgttttgcgcggtaatatcggcattcgaaacctgcaaaattctctctcggttggtcacattcccgtcacatagaacctggagacggaaagcggaacctgcagtgtcttcagcttgcaactcagcctccagtctctgtacccaaccggagagagatataaacaccacgttggtggcagtggtgacaaagaatgagtatcgagaatggatatccttggtgaaagtaggccatgaggttgtttcctccccatccttgatcgtatctagtgattcgaccaggaccaattcagtcggctctgaaacaggagtttggaacgcgttctttctagctttaggtagccattgtccttcaacgccatcgagctctagacagatgtgaactcggccattcccactagtaagagagagaactgttgccgaaagcttatcttggtccccagtttccacggctaattcttcttcctcgcccatcatgagatcctcgacgtttagactggcggcaataacaagaagatcacaaagatccaaatcatcgagctcatcgccagtttcgaagcggaaaggcccttgtaatcttggaatagcgctaggattggccgggcgcgtgaacacatctgcgccttgaattgttcgtgatccagaaggcgcatccagaggttcttgttcatcaagctcagaaagccagtcatactgttgccggcaggcaatcagttcctcctccgattcctgggattcctgttctaaagcaccgagtttcggaataatcgctgcagagagggaagggatggtcgtagaaggggcttgccacttaaaaggcaacagaggacaaagcgcatagagatcaccgggtctcatggctacccacagggtcataggcgcccacgcatcttctttctcattcccattgccagcgaaacaggccgacgcaacctccatatcaataacatcagcggagaatcccttgcttttgccaaatccagaaggcgcgaagtcctggtcgcacgaggtcccatcgacaagtttcttcagatcgattgctagagtcggctggtcgaaggaccagtggttattccggtccaactcccagacacgtactgcagcgtcagccgtgacagtaacaatgcagcctcctaaattggtgtgcaaccccagtggatgccatagcgcagagaccaccggagcctcaggaataacatgggttgtcggtcctaactgatatgtcttcagccggatagagtcggagtcggaggacgaaaggtgtgaagaatcgggaagaacggagatatgaacggtgtgttcagtgactatggcaaggaaggcgccattcggagaggggatgatctgtttgatctgtccatacacgggcactgctaagacctgcggaactgttagtcgcattcaatttaagtcggattttgggtggaatagctttgcataccctgtagggaggaacctggctgaggtcaatttgctcttcagcttgactagcatatccctttttctgcttaatctcttgttgccattggtctttgagtcgggcaaggtttgaccaccgtatttcattgtcaacaacagcgaacacctcattgcctctcttggcgatcgttcgtgtagctccatttctcatgggcttggatccagtttgcaggtcctcccctgggctctgggctgaactgctagacaggaactttgcgccaggtgagggccggcacagccaggcaggcgcataactgttgaccttcggcattaaggacgattcgtgaaataaattgtataatcggagggtgttgacagtttcagatcatcctggggcggtcggaaatagcagacgagtagcgtatgtgggaaaaaaaacaaagttgacgaaagcaaagttgttgatgcggagtggaattcttgggtgccaagatctttcgaagagctccgagctgctttgcttccccaactacctgccgtcaaccacacactccaagttcaacctttatctcaattcactatgagtttgctggctgtaaacacggtcgaccgactggatcgaccaagcgcctactacgtcagcaaggtgagtactcgccctggactgactgccctttaccaagctgtgtcgaaaccagtccaaataggctatagaggctgaacaaactgtccacagaacaagcgacgcagatacaatgatcgtgaggaggaggaaccgcagcaacaggagaaacccgatgacaaattgaaaaatgcgacaaccctctacgtgggaaatctgtatgcaagcatgcaataacttagacgcaattgtcttactaaccaacccaagttcgttttataccaccgaggaacagattcatgaactcttcgccaagtgagaatgcgctttcgagtctcttcgaattatgattaacctcgaattctaggtgcggcgagatcaagcgacttgtaatgggcctcgaccgattcaacaaaacaccctgcggcttttgctttgtcgagtattatacccatcaggatgcgctagattgcttgaagtacatcggaggaaccaagctggacgagcggatcattcggacagaccttgaccctggatttgaagaaggacggcaatttgggtatgtggtcttcaccaatggcggctttaagctcgtacttactgactttcgctgcagacgaggcaaatcgggcggtcaagtgcgcgatgaataccgcgaagaatacgatccgggccgtggtggatatggccgcgcctatgatgagcagcgccagcgcgaggaggacgaatacggtgctggaagataggtcgggacataatggaaaaggactggcttggcaaagcaatggcgttacttcatggaagggtgaatccaattagcagaaagaggaaatgtctattcaccgaataccctatttacaactgtcttttttccaccttctaatgctggtgaattattgctttaacttgtctcgtttcagcactgctgcttgaacttcgcgcaaccaccaagtgtggattcttgcgtcacctgtcagctccgggtgaaagctggtgccgaatacattgccctgtcgcactgcaacaatgtcgccacttccccggtctgaattgatatctccaccccccgtggcgggttgagctgccggtctcactaatgttgctagtacctcaacgtgctctgctgttgctgcttgcgccactgagtcccgtgcttctctggacggtgccacgacaacatcttcctgttgaatctcttctttttggatgccctcatgatggggaagaatcttttcgacgataggggctcgaatgaatactgctgggaagggaggcgcgtcctgacccaagaatggcagatccaacaggccttggaagctttctgtctgtcgaccgaagtggtttcggttcactcgcacatcaagaccaccgatcagctcttgccctcctttttttgtcttgttggcagactcggcgagcaaaatgagcccggcgcatgtaccccaagttggtttgcgatccactctacacatacccaacgtattagattgaattcatatgaactaatcaaattcacttactttacaaattcccgcaatggctcgaggagatttgaccttgctgcgaccaaagacatggtggtactctcgcctccgggcaagaccaggccatcgcatgttgccagttcttgtggcgttcgtacttcgatgaagtgccattccgacggcgtcacttgctcagcggcttttttcaaaagctgcacatgctcaaaaaaagcgccctgcagggccagaactccaacagtgatagccattgtctcgaaagataagaatcgaagacctcgaattcttgatattgatgactcgtttggagcacgtgcctttaacttcccggcggggagcttatctccacgtgatatctctgtggcgcatgtcgggatactctcggactttactccaaagtttttggctgggaagttgactggataaccccagtcatgatagtatagaaatcaaatttacctacagaaagactgatcaggtagccctacctggtatatcacactagttccaatgatttttttcctctcttaggtacgccgttgtattatcggcacgtgttgatagataagaactctgataaggcgcttctatttaggtgggatgctgcatcctaggctggtacgagtatacgagaccccatgataacaatgcaatggtagacctcggtgtatctggacgtgtaagtagctactggcccttcaggaattacccactgataaagtgcagaccaaagcggattccaatgagattaaacagaacgacatcttaaagggccagcccacgttggtccgatggtacatcgatgtcagacgttgggatgaaaaatcctttgaccttccttttctccaaactctgaatgagtctgatcaggtagctgtcaagaagtactaccaaacttcggacaaacgcctgtccttggcctcccagctactgaaatattactatgttcaccaagccactggcactccctggagcaaggttacgattcagcgtactcctattcccgaaaatcgtccattctacgactcaagtcttgatttcaacgtcagccaccaggctggtctcactttgttcgcaggcacgcgtgccgcaacagctcactccttaaccggcgaaccacaaggcttgcctcgcgtgggaattgacattgcctgtgttgacgaaccctctcgccgtcgtgctaatcgtccaccgaagactcttgccgacctggcaactttcgtggatgtcttcagtgatgttctctcaccccgtgagcttgcgaccatcaagaacccgtacgcgactcttaaattggctcgtgagcttggtctgagtaaaattgacccgagaaaagacaacgaggaagttcatgctgcctacggcattcggctgttctactcaatttgggctctcaaggaggcttacttgaaaatgaccggggacggccttctggcctcttggataaaggatctggaattcacaaatgtcattcccccagaacccgtacagaaacttggatttccaggtcgccctctcactcctacaactctcaatgcgccctcagtcgaaaattggggccggccttactccgatgtcaaaatatccttacgtggcattcctgaccattctgtgcgagttcagctcgtcggcttcgagtccgactacatcgtcgctatagccgcttcaggccccaatattggagccatttcgcagcagatggccgtgaatggcagcgatcatcacctacctgggtatatcacagccctcgaccctaaaattgaacatcagaacgtccgaattccccccaatgcgcttcgcacagtcggcgaccgggacccctggtgcgttggctcggcgattgtagacccctggttgcccatgcaggaggttgatattgacattgatattcggccctgtgccgagggccgctgcgagcatctacggaacccaccgagcttctaagtcccttcttcctgggatatgaaccagtaatcatccctgagttacctgcatgttgcatctcctcatctcatactcctttctgagcgagatttcgcgatgattccccttgagcatatttctgcattgctttgttgtgattagcgaaaatcaaatattcctcccatctttagggacttttgtttcaagtgtaatctgttcttagctagtcgagtgccgcttagatgtttatccctaataagcctctgtgaattttcactctccgatgtgatttagatcgaacccaaagtcaatattcgaagacgaagtatatgttgcacgaaaaaagacgagtaagaagcccaagcctatctatgttctgtggtctaatgtaaaatcaaatatataagtaacaaaagcgagtatctaacagtagccgggtcgtgtcatgcgtttacgctaaggatatatacattttgaattgaaaaggggggagaggcgaatcaagagagaagatgatgttagaaggcaatgccgatatctagatcattgttgttctcatgagcagtgtcgggtagtgtcggataggttccacgtctgaggccctcaaattctgtttgttgggtcgaactggagtaggtaccgaagaattgggcaggattatactgtagtgtatgaagggcggatttcttcttcgttaattgtggactctgcgtttgctctctgctgttgtgaactttgaattttgcactcaaaccaggagagacagatggcaaatgccgagcacggagctatgtgacgaatcacaattttgtttgccacttagatttcaatggcgctggagacgccgttggtgcgagaaacatcgacttcgttcttctgtacatgagacatttcttcaagagttttgagcattgaatcccgcgtcgactgggtcaagctatcgacatcgctcgatgtcaaatcctgagtcaaaatgggaggtaaaactgttccaaaattgttagccatgttctatatgacatatattggcaacttttaataacacccacccttaattttgatagtcccagcgttgaatcgccaggcacgaggcgacagaacgtgcgaatagttctctgtcacaatcggcacaattggcgcaccggccttgacagcgaggtggaaagcacctttcttaaaaggtaggagagtaggctcgtcggagtaactccgggtgccctcagcgaaaatgaaaacgctctggcggtgattgcgcatctcggcggcggcaccatcgaaagccttgagggctgtctcccggttggcacggtcaatgaacacagtccgggacagagacatgaaccagcccaggaaaggaatattccgcagtgacttcttggcagtcacactgcagtatggcgggaagacactgccaagcatcaacacgtcaagctcagtctggtggttaccaatgaaaacggccggacgtgtggagaggtattcttcgccttcgacaacctcgaacttaacgccagttgtgaaccgcatcagccacttaaagctacggcctgctgcccactgcgaaacacggccgtatccaactagccgcagacagatcgagacgagcacaccgtacgcggcactgacgaggagacagccatacgaggcgagacaccgggcgacaaaagcggcgcgaggcactttttgaccgagtgcaaagagggagacggtcactaccacgaaagaggtaacacctgaaacaatataagatccgaaagacatgttgacggttgttgggcgatcaagaagagctaggtaaatgcggttagagggtgaaaattatacttcatgagaggggacgtaccttgttcactagtatatggacaacagccagcccacgacttgaatacgaggatggaatcagcgaagaaaagaggaataacagatcaaatccaagattgagccatgcatggcttgtggagaagggcaaatggtagagagttgaatcgtttttctgccccgatgccgactcaccgcctggtatgtgtatatgacggtgtcaccagggcacttgcgggggtatttacaccagaatcaaagtatattttaaggattcagccaataatgagaatctctatcctcaaaaaataatagaattatgcattcaccatcctcatgatgcatgcccagggaaaaccgtgaaactaatgtacagaacaccatcatatgccagatgtctaaacctggaaaagaaaactccacagtgatgccgtgcaaagaggccctcaaacgccgagttcataagagagggcccccgtgggaacccaatagaaagacctgagacattacgtctacgctatgtcctcatcctccatatcgtcgtcgtctaacgactccattgcatccttgatgtattgtgcagcctgtgtgagatcataatcagaaagaacttaaaaaagagaggggaatctaaaaaaaaatactctaagacgtacctttgggtccaagttcaaggctgccgtgaaatgcttgatagcattggccttgtcgtggagcattttgtacagctttccaagaaggtagtgcacgtttgcctcgtccggcgccatgtccttgaggacctttaattctgccaaagcaaacttgtactcgcgcagcttcataagtacgcgcgccttgcggaacttggctaataccgagttgggggctagcgaggaggctcgtccgtagtggaccagggcatcttggggattgttcattttctccagtaccagaccaatgcagcaaatgagcaccgcgtttgtcgggttgatgctggctgcattgcggaagtgctgctcagcgaagtcaagcttgcccatcttgtcatacaccgttcccagtccgtaccaagcattgtaatgtcgattgtccgcgttgatgccgtggcgataggcctccaatgccttgtcgtattcttcgttggcgacatattcatgtccctgtagcgtgaaagcatatgcaaattcaggatcgagcatagtcgcacgcttgaagcacttgagtgcttgatcatgatcccgttggtgagaaaaagagttgccaatagcacaccacgcctgaggggataggcgatcagcttcgagtagctgatgcgccaagtaagccagttctacatcacttttcagatgccataagacggtcgagtagatctccatatcctcgatgcgggagggcgctaatttttgaaccctagaaaagtacttcgcggcttctgtgtagcttgcttgttcgaaataggtccgtccaagttgagacaaaacccaaggtgtttcgcgctggccttgcgagagagaattgaaagagctgatggcatccgcgcacctgtaacggctcaatgagaaatatccagacgcaagtttattgaaaagacccaaaagccaatccaaggcttcaagctctttagttttttcggcatttttgggtaatggggggacgagatgatgcgattgagacaagccagtccgattatctttaccatcattgtcgggtgtctcaatgggttttcgattgccactcacgacacggccgacagtgggcacacctcctactcgtccttttgtagggcctcctctcaacttcttcatctcgcgaccgtctctgccagtaagcgtgctgtttgaaagcttgctgctcgtaggtttgatctggttgaagaggcgaacgcttcggcgctggggagcacctggttcactcggttgtgatgagggaagtggatgggccacttgcccagagactgtgcgcttgcggtccccgaatctcgatacaagagaggaatctcgttctaccggagcagctggctgagtctctggttcggtccgcgtcttgtggcgaggtctgattcccgttggacgcattcgcggcggaggttgcccggtatggtcaaggctcatagtttggattgtccgtgtctttcgggcaggggccaagggtgcttcccatccagcttctgggtctgtgacgccattcgcaatgcggaagtcatcagagccactgctctgtgcgcctggggtctccattccgtcgtggaaaaccggctgtgccatagcagcaaaattaacagagctcccatttaacttttcccaaagagcagagcttccaaatgtggtgtcagtttcgccacgggaggcagagaccataaaagggtcggattcagggttatttggaggctgcattgggaaattcccttcttcgtaagccacgtggtcctgcacagtagttatttcctccggcgatgaagatattattgcaagaagttctgggctaagttgaaagatattcgggacacgaatattgacacctgatattgcattagaaaaaatcgccttgagagaagaagttaaatcaatacctgtttcgcaaagccctaggaaagcatcccacatgaaggggttcagtttcagtgcctccacgtaacagtcaactgcttttgtcaaatctttatgtgcgtgccaaagtttcccttgcaaagaatacacagctgcagcatcaggcaggtgctgtcgctgagtctcactatgcttgtctacaatgtggttagcaagtgagcttggaattgaaggaaaagtttgctggcacttactccagtggttcttagtgacccagaggggtttgctacgctccagagccgtaacaccatccaagtatttccccaagtctaagcaggtctgagcaaagacatatgcacaaccagcatgcagaccacgtgagcccgaaggctggctgcattcgaacgccgccttcacttctccattgtgtaggtggcaaagggcgagcagatattgggcctcaaatgatcgtggttcatatgcgaggaggcgtgaagcgaggaagagcgcattgcggattaggttattgtcgagctggtaatagatgaggtgccttagctggctggcaacatgcccggtggacaaggccatagtgaggggtcagcaacacggtatgcgatagcacaaggcaaggcggaaattctttagtgattattggaagtggagataataatgcgatgcgcagagtcagttccttagcgttactgtagcatcaatgtccgacgcctttgtaatgtcctccaagacgcggggaggaaacaaagacgcgatcgagtgggttgttgcagcacgagcgaatggtcccatcaacagccacgagacatggacagcagcaagtccgatgtcttggtttgaattcgtctagatgcaggagctatcgagtgttctcggtgtggaacaatgaggaatgtaaacccaagccggaaatggtaagcggatgaagaatagaaagaagtgaagagtgagtcctctggttacgtcatctgcggacgcaggatgagtctctcagagtgccaggaacatttccaaataagcggaggactgcaagatgtgctcaaataggattcgttctttctgttattctggtctgaggcggcctttgtcatttctgccgttcttgtcgggcggtgggggtagtggagggcaacaatcacccaatgtgctatagctgtcatatgcaggtcccctctcttcttcttccttctccgcccagtctcgaattccgatcatctgcttgccacttgagaggggaaaagcctggtcaattcatctagggcatctgttctagaaaagatcattgcagatcgcttggtgatcgcattcaaccatggctcaggtatgtagtgaggacgcctgcttgctgcgactaaacctcggattagctccgatcgttgggttgaaaaattctgaccgtatcacagaaagctaccaaatctctagcggctcgcaatggtgctgtcctcagccgtacgcacatcatctctgctgcattgcacctgctcttcctcctactgcactttgccttccagcggccgcgttcactgaagccatacttcttcctggccgttccgacccttgcaattgaatattatttggaccgaatgggccggcctcgttataatgaagatggttccctgcgttccgccggcgaagatctcaacgccaccggtctgacggagtatatgtgggatgtactttactggacccagggatgcattgttactgtttgcctcttcaatgacagggcctggtggttgtgggctgtgatcccattatactccgtatacgccgcctacaccacgataatgggtgtgaagaagggatttgctggaatgggtggtggtgatgcgggtcaagagaccgatgccccaaagagcaagacgcagttgaagaaagaaaagagaggctcgaccatgaagtataggtgatcagagagtggaggatatgtacaaaatgagttgatgtagaatgggaactccagtcatttccatctttcctagttggatgccatcttgaccgtcattttcattctatatatttatatattggaacagaggaatttcctactacccccctcaacctacgagcttggctctgacgctgtagattttatataatatcatgatttcacttttctctccacataaacataacacgtgtgcattgatttctgaggcaagattaatcgaatccgtttatatgtgtagattcttgccattacctatgtaatcatccttattagcccgtttgataggagggatgcacaccgtgggtgatagctacatacacatcgaggtcgggatacccaaccgctcagaaattacacaaaataattccataactacatatttagtttcaaaaaagtcattcgttatgtactgaacatatctcacattaaacaagcctcgtatttcaaccaggaagtgagtagagaggaaaattgagatagagcgggaaaaagaaagcaagtctgtgcatgttgcaaatcatgagcatatggccatcgtgtcaaattatacggggaataatgcgtcgtgagccgcgcatggcattcccaagacatgggtttctttcggaacaaaatgattaagtccggatcaaaagaagaaaaagaaagaaaaagttgagagacgctgaaaaaaaccgatcaaagttcatctttgactgaaactgcggaactcttgatgctgcttgttgtatctttaaggtgggctgtggcggtctcgactgcctcgaagataacgttgctagccggtagattggcggctagatcagccagctgagacatggcgtcctttttggctctagcgagacgaatagctgcactctccactgcgctgggttccttgccgtagatagcagcgctggctgtagattgaatattctcaatggcatccttagcgacatcgaggtaactcgattccttgccgtaaactgcgctaatgatctgagccgatgctgttgagtacgcatcagctgcggcatcagtggctttctcgtaggaacccttgggggttccgtagataccaacgctggcggtttcgacagcagcacggagttggttattcgcgtgttgtatgatgtcctctacgctcggggcttctgaaataacagaagcagcgacggaggacgcagatccataagcctcattaacgtagctagaggcagacgagaaagcgacagccgggtacggcgtctcatatgcggctctcagtttgctcagcacactctccgtatatgaaggttgcttgcccgcaatcagttcagagacaagcccttggactgcctcaaactgcggacgcccattattcaccacttgctgcagaaacggcgttggcgcaccataaatctgctcactggctttcgagatgaggctttcccatttttcaggtacttggctataaagggactctacagggcccgtggaggttccgtggatgacagagctagcggaaatggaagccacagagagagacgaagaagccgcagagagggcagcattgtatcgggatgaagcatcttcaacaatactttgtgctttgccgccatctgcgggagacatgaccgagcttgcagatgcgacgacagcggcaaggctggcagaaactaacgaggacacatgctcgtattgagatcctgcttcctcaatgatccccttagagcttccggctggtgtgggggttggagaaccatagaccgcctcggatgccgtagagacaaagacagagtagtggtcatgggccaacccgactgcctcgtagtagcgacgctgcgcatcaaggacgaatggctcgagaccgccctgaggaatactggctgttgtcgctggtggctgcactcgagctaattgttcagatgctaagctgagtccatggcttagccgggaagacgcaatggatgagatatgggccagaggtccgacgttggatggtgtcggggtagcacgaacactgcggagcttcgattccagctcatctgtggcgtattttagagacccggaataggccgactctatggaagcgagaatctggacatgaacaggagcgctagattcggctattcggctaagaacttgagacttcgcgatctcatagagtactttagcctgatgtgtggaatcagcaaatgttgagctggctccgtccatcaaagattggacaaccggtgttggggtgccgtagatgacggacgacgcactgtggcagaaactcgcattagcgataattcgatttttgtgcagttttgaaacacgctgaatatgctatactacttacgcggctacagcatcgctatatttctcagagccgtcgctgtaaaccttttcgacagggctgagaggggtgccatggataacggtagaggcggcggaccaagcaacagagtactgttcactggccaatgatgctaccttctcaccgactccgttggtcgtcgatgcaccatagacagcttcgctaacagcatcgctggccccggcgtaggtatcgccaaccttacttgccagactgtcctggacattgtggctctcatcatctaggataggcgcttgatgcaaatttgcatctgcagccgcaacaccaaaggcgggtcttgcggagggctggttttccaccacaatatcatcgtccataacagactcgttaacgccatcaaagtccgcttcagcattgacagccgcggaaggctcatcggtaaagggggtttcctcgtaagcgtcatccgatattggtgttgccacctcttcggaagactcatcgttaccgaaatccatcttggcagcttcttcgtcagattcctcggtctcttcttgggccttgggccttgttggcggggcttcggtgcgagtttcaaaatgatcgcttacttcacgagccgcgatcttccagatcccaacatcctttaaccgaacaagttccctggcagcttgttcggcttcatgcatgccttgatctaagatatcactcgccacggctctggcgtcagatacggatttgtggttcatgccgacatttcggatgtcgttacgccattcctcgagttgggctttgagggcatggtactttgcccaatccttgtatgtgacaccatccatccacgcccagcgcatgccaatttcttgtaagcctagattgcgaatgctgtcgagaacatctattgtcgaattgacagcagcagtgactcggcgaacgagttcgtcctcgaacgagatagaccactctcggagtgcatgggcgcgatctctcacagagatagcagaagttcggatttcccgaatgagcaagtcgctagtagacttctcgatctccggggcgtccacctctggcattgaacccgcaagttcattgatgcgttgtttcatggaggaaatctgctcggctgaaaccgactgaagagcggtagaaaggctctggccatgggtgttcgcgctgcttgcaaccagggcggacacgatctccccaatacgtccctcaaggtcttcaatacctttatcggccgcgagagaaaatctttcctgccaccgccaaaggtccgaatctatctcctcgcggacttgctgggcttgctcggtaggagttagagtgggttggacggaagcctggggcgtgaaggttgaagtcatagtggtcgaagtgtggatttgttcttgtgacttggtagtcaaagagctaacgggctggactgttgagctactaaattttatggtcagcatgctatggactggataaaccaaggaacttttatgtacctatccacgtcctctatgacagcgcgaagtcgcttgccctccctgtagcttgccaatcgctgcccaatcttgacgagctggggctccacttgttcagagtaaagaccagtaacgtgaggccatagtgagctgttagcaaagtagatcgcggatgaccaggtatactgcgccccgggcatgacatgggttgccaaaataccctggccggtggagtaaactttcccgatgaaaggttttgaacgcgcgtagaaagggaccagttggccctgatagacattgagcacaacggtgctggcccattggcagtatggagagacaacatcaacgctttgctggacgtggggatcaatcttggctaagtaaacctggtgaaccttattttgagcagtccgtagtcttggtgagacttgatgttcccattgctcaatcccatatgcctgagcttgcttcaatgtcggcgctccatacttctcatatcctgatttggtaaattttgatgcaggggtataaactcgctgattaaaaactttcacgtaaggccgggcttgatcaacgtaaggcgccgcataaatatcataatatggcgtcacataaggttccacgtgtgaacgagcaatcaggtagggcttgcagactcgaggtgatgtctctgtgaggtcttcgagatgggttgggcacctgaaaaatggcgtcaagagtgcgtaccagatacatagcctgagaagtgaagatgttaaaaggggcttttcgctgtatacaagtatggcgatgctatcactcacctcacgataagtccgattgtccatcggacgaagccctttctccgtggcttttcaagatccattcggccctttgctttggtcgtgacatccgtcacttcattccctttcactaccatcgcaactgaggctgaccttgtcgaggccacgcgatcccctcgtgatattcgaggtcggccgaattcgcggaggacttcccttctacacacttagatcgagtcggctcagtatgaaattatcgctgcatcgggaataagctcacagcccagttgaatataaggcttttcgagattgtgctcgagactgcgtgaatcaaagcaaattagctgctgtaggcagaatgttcgcgtcggtcttggcgttagcaactttcacgggaggctaggtcaatttcaagaagaatagttggttacgaggaacgaaaggtcgaacgaatgggttttaggtctgatgagaaagaaaacgcagggacaactttattacaatatgaggacaaggcgatcgcatatgacacaataaatcagggatttgtttttagagctcagtgaggtcatcggtggctacacgtactgcatatacagcaatacccagctactatcgccttgacaagcaggtattgtcatatttcatgtattgccaaaacacaccgccgagtcggcgaattggaccccgggcagctacctggacaggctgaattgctttgttacaatcaagcaccaatgatctacagattacggttgtgaggtacgatactcctatcatataattgtcaatcttggcctcactaatcattctattcagttcaaatcggattgcccaccaacacaagccttccgtatgttcacaacctttgccattcccgcttgactaggaacatggtgaatatctgatcaaccaccaccgtcaaatcggcgagattcacgaattatggagcccgcagagaaccaattccgcgataatgcggataataccgcattccccgatctaatgaacgacccggcttatgacgaaagggaaaagggatttgacgacctagatacctgtcggatatgtcatggcgaggcgacagaagaggaaccgttgttttacccgtgcaagtgcagcggtagtattaaattcgtccaccaaatttgtctcgttgaatggttgtcccactcacagaagaaacactgcgagctctgcaaaacgcccttccgatttaccaaactatacgacccaaacatgccacagagccttccagcacctctgttcgcgaagcaagccctgatacaatgcttccggactctagtgacttggttgagatttgttctcgtagcatttgtctggctaggatggctgccgtggtcgatgcgcgcaatctggagggcattattttggcttgctgatggacggtggtctgccaatgaaaacgttcggaaccaggccgcacaaaccgctcaaaatggtctcgggcaactgttctcaaatggcagtgcagtaaatactgcagtaaatactgcggtaactgactcgattacttcgtcaatttctaatgctgtcgtctcatctactactgctgtaccatctgcacgatcgtcaattctcaatttcgctgccggagagccgctcatgcttaccctcatcaaaaaagtgatacccacacttttcatgccagcgtttacctcgactgtcgggcaaggcaacggacaggacaacgtcacggttagctcaatcaaacctcggtatccgtcatggctttcggacgtgaagttcttgaactcgttgacaccgtacccgacaatcaacaacatgatcatggatacattagaaggacagctcatcacccttcttgtggtggttgcgtttattctcctcttcctgattcgagaatgggttgttcaacagcaacccatggtaaatattgcagaaggagaacgtgaggctgctcttcagttaattgcaaatgccaacaatcggataaatgatcgattcaatgaagaaggtggtattcgacaacctgaacccattcccgctcgcgcggaaaatgagatcaacaatgaacacgctcaagcccatgagttggacaatgacatccttcctcattttgttccccactccccagctctgtcctcgaatgattccgaatacggtccccctgagtttgaagcggagctacgagactacaatgggaatgacctggaatacgaaacaggaggccctcctcctacggctcgggctctagctttccgggacctagtggcccgtactcatggcaaccatgaagagatgctgcgcattctccgcgaagaggctcatggggatgatctggattggattgtgaatgcgatcactggagcgaccgtagaccaagattcatcagcagggccttctattcgtccccatgatctcgacaatccagaagtctcggacgatgtcgatggtgttaatcttgaagttggagatggagaggatcacccgcctcatgcggacgccggaccttatgcccagaacgtgaatcacgggccgccaactcgagacaatgccattcctgtcaatatacaaatggaccgtcggcctccattgggcatcactgagcgggtgttcgaatggttttggggagatatcacacctgtagcccgtgatacagaagagccagtccccgaagatgacgaacatattgttcaggatccagccttggaagacccattcgtgccctttcccaggatggaagagaggccagcagccgatgctgctgccgcgaatgccgctgccgtcgcggatgccgagctggaccctaacgatatcgatgcaatcgaaggggacgatttcgaagggatcatggacctcattggcatgcatggtcccattttcgggcttttccagaacggcgtcttctgtgcccttctgattgcgttcacagtagccatcggtatctggctcccgtatctatggggtaaaattgctcttgtgttattggccaatcctctcgaactcgtcatcggtgttcctatcaccgcggttgaagtcgtcacggacattgctcttgatactcttattggtgtcgtgggatatctcatgtactggttcagccttttcttcaaaattgtactgagccctgtcggtgctcttttgcctattggagaatggattcctcgggacaactcagtcactagtgcatcgctttccctcatcgacgcaagcagtcaccgcttgaacaaagtgatcaaagcattcctggtcttccacgagtctgatattccaatgttctcagtgctctcgcaccaggcgcttaaattacatcaggctcgcctcggtgctgtgttccaatcgggctttgccgctgtcaagttcatcgtacatgacttccctcttcggcttgcgacgctcggtgttccccgtgccctgtctttcgacattgaccttgcccatttcaagaatcttattggccaagcccaacaacaactcaccaccttcgctaaatcatcgcttttctcgatgcctggaacaagatttatgaacgcaagtgcagcgaaagcagcctctgccacagtgccggtcgattatgacctagcagtctgggattccaaggatcgtgttattgctatcttcatgggctatttgctagcattcatgatagggcttctctatctacgaatcacagggctgctctctggtgctgatcggggacaaaggatcgagggcctgcttgctgaggtcctgatacaagccggaggagttatgaaagtcatcctcatcatcgggattgagatgattgtcttccctttgtattgtggcagtcttcttgatcttgctttacttccgatcttctctaatgctacagtggcctctcgtattgcttttactgctgcatctccgctcacttcgcttttcgtgcactggtttgttggcacttgttacatgttccactttgccctatttgtttccatgtgcagaaagattttgagaagcggtgtgctttgtaagtgcctgttatctacgtgccagaccttgattggattgctaacggttcgactctagatttcattcgtgaccctgatgatccaactttccacccaatacgcgatgttctcgaacgcaccatcactacccagctccgtaagatcggtttcagtgcccttgtatacggtgcgctagtgatcctttgtctaggaggtgtcgtatggggcttgcactttgctctcgatggtgttctcccgattcattggtcggccagtgcgccgatgctcgagttcccggttgacctcctgttctacaacttcgtgttgcctgtagttattcaatctttcaaaccctcagatggtttgcatgatttatatgactggtggttccacaagtgtgctcatttcttgcgtctcagcaactttttctttcctgaaagacacctggaggaagaaggctaccacgttcggaagacatggtggggtattctctctagaagcgagggtgactgggaacacccggtcgttggagatgaccagcaggctgcagctgagcgggaaaatcgtgacgtctacttcctgcgcgatggtcgatacgtgcgcgcccctggctccgatcaggtccgcattcccaaaggcaaccacgttttccttgaggtcactgaggacaatgaacgtgttgatgggaagcccgatactgccgatggactacatggccgatctagcaacatgttcaccaaagtatacatccctccctccttccggagtcggattgctgcctttattcttctaatctggctctttgctgcaaccactggggtaggcatcactattcttcccttggtcattggtcggaagatcattgtgtcctactcctctactccggctccagtgaacgacgtctacgctttttcaagtggtctttgtgtggtcggtgcacttgcctacctggcgtactactctagcaccgcactaaactttgtgcgagagaattcaggcgcataccttcgttcccctcgccaagcagcccaaaccagtctaggcctcgtgatgcatactgctcgacttatctacatgacccaagttgccattatcctcctaccatcactcttcgcgctgctcactgaactatacattctcattccagcgcacaccctctttggtgatggagagtcacatgttgtccatgtggttcaggactgggcgctcggggtgttgtatgttcagatggctatcaagttgactttctggcagccccaatccagggtggcagctgcggtcaacagtgtcttccaaaatggttggctgaagcccaatgcgagccttgccactcgtgcccttgttcttccaatcgttctcttcactgcagcagcggtcactttgcccttgtcatttgggttcattgtgcgctggacaattttctattcccacgtcggagtgcagcctaatatctaccgttattcttatcctactacactcttgattgtgctctctttatggatggcacatctactgctgagacgagtggcggtctggcgcagcaatattcgcgacgaagtctacctcattggagagagactgcataacttcagtgagaaacgaggacgtgtgacggtgtgtcgcgggtgatgacaggatgacgaaatggatggatgtttgataattttggcctggtattccagcgactctcttaccttttagcttcattggatgtacatttaactcgaacgactagaatccaagtattagttacttaggacctttcatcctgcccgctcgccgggattgtgcctgaggcatgatttttatatacgtaacgggtattggtaataccgtaatatcaatattcattacctgctgcctaccccgtggccccactattggccctctcttgtgaccgctcattggttaggcaacaggattccctcgatgcgccgttgtgtggttatcggccttcatcgccatcctcaaggcacccattgaaactgctcttgcaagtctttatcgattcattcctcctgtccgatggattgtttgccttttagcgactctcactatgtgttcttgaacgttccctctccagtgccttgtctctaatgctcgatactgtatctgtcattcttatcgattccctccgtaatcgccaagatgtcagtcctccggcatggaggaggaggcggctttctccagcggcgcctcacgaaactatataccgatacgaaaacatcctgcgagagtgttacgacagcctccaaagccctcgatgatcctgagctcgtcgccctccacgggagtttccagaaacagagggatcgcttgctagcatggggtctagattggagcgacgcaagcgccgcgcagcccaacgacatcgatgaatcgttgactgctgcaggtttcagcgatgtcgttgagagtgtcatgtcatcgatccaagaactactcaacgatgccgagcaagtacagcatttggatgcgcccatgcttccctcgaaggaacggaaggtcgatataccatcgaaggatacccttggtagcagacccgtcaaaacgcaatggacagaagaagatataactcgctcaaacaagatcttgaatgaactcactggctgtattgataccctttatgatctctcgcgctcccggcggacaatggcttccagcatgtcatccagcaggaacagcgcgcgccgcccacgacccaatcccacctcaacttatgattcatctcatggctcattctctgattccaaggagaaagcacaaagcccgaagcaaatgttcgatccattcacctattcgcccacgaccgcgcaccgtgactctcttaatcctttcctgcccctgaaccatcttctcattgatcgctcagctctgcaactatacggtgcggcccacgataatagccctcctccgtatgaacctgttgcggcatcttccaattcgcgtgccattggacgcctgaagtcatcggcatcgcatcttctcacctccacaaaagagtcccatgtctccgtgcttgtcgagtttatgcctatattggcggagtcaaaaatggataacaaaagtgctcgattggaaaagctccaaaagtctattgagcaattgctacagaacgccaggatctcacacttagggttgatgcgatttttgggctactgcattgataactcgaattctcgctatgcattcctttatcagatgccggttgactacttcccattcctacagaatccgagtgacttgttgaaggagttaaagcctaagccattggtcgctcttcttccttcggcagaggagtatcgggagaatcgagttccgaaccttgacactcgctttcgattggcttacgatctcttgatgtcctctctccacttgagaagtcaaaatgccgttcatggaaacatcaacagcagcaatgttatcttctttccgggtcgtagtgacacgagtgatgatgaaagtggtcttgcacctgatcttcgccgtccttatcttacttctccggcacggttctctggggatggaccaacccctgagccgttatcttcggcaatgtatcgtcacccagaggacaagagatgtgttgaggatgatggcgcgtgggcctatgatctttactcgctaggcctcattttattagagataggcctatgggcaccagttggacgactttggaagatgaagtacgaccgttcatggttcaagcatcgagtggaagatctctatgtcaaaaaacttggcccgaagtgcggcggtgcttatcttcaagccgttcagttgtgccttgatgcccccaacttccacttatcgacacagccgatgactgacctcggtcttcgtgttccacaaatctaccactacccggtactcgacttgtcggaccctgatggcaccttctctttttcaatgaatttcatgtacacaatctgcaagattctttggtcatgttgccggattgatatcttttcggcaccctccgcagaagaattggatgactgcctcccgcttgctcttgtccctacccccgagccggtcaccattgaggataaagtcagggcatacaaatcatcgaagcgcgagatgtctaattacgacaaacaacttcccacaattcctaccgatgcatggggtgtcgtgaatgaagacaagttcattgaaaagccacacaaaaaacggaccgtcaagagacttccgcacttggaaataccagacgagcacctacaagagtggaatttccaaataatgcctcgagtgagtcgccttcttcagaaggttttgaaggagtcttctgagtcgtgtggagtaaacctcattatgactggcgagtcgcctgaaagtgccaaaacgacgatttgtgttacgtgcgccagtgtgaagaaagttcgaatggcccttaagaagcacttcgctcttggtcgggatgactgggatttgattgtcctccgtggcgatatcgagcggtccaaggttcctcggaacaggcgccgaaggccggctaaggctcgcccgaatgtgtccaatgatacaccttttcgccagcgagagctcaatccatgccatcagcagcgacctctgtgcggagcatctatcggcgcctttcagaacgaagagcacttaccccctgtctcatatggtggtgccgtctttgtcgatggcttgccgtatggtctaacagttcatcacatgttagaagctcctagcgaagatgagagcgaaggcagtgactcaaatcaagatgccccttctcggtccgcggggaactggccccgtgatatatcaaatatcccacatcctggattcacgtacgactatccagaggatgactcatctgacgtgaacttcgacttcgaaatttccgatctggaggacgaggacgatccatcacacggtcttgagtctggatatgaagaattctggctttcagatgaagattcatcagatgatgactccgtcggccccgatgacgatgacggtgacaccgcgtccatcggcgatactgctggtatcgaacctggcgaagaaccccggctgcttgtcactcagccagctattgacgatgtacacgaagacttttttccatctccagaagatcgtgatgacgagcacctagcctcacattccctcggctatgtacatgcatcatcgggagtacggcgctggacccgaaagggcctgaaacatgaaattgactgggcgctcatcaaagtcgatgaagcccgtatggaccctcgcaacatcgttctcgacactactagatccagtgccgctcggccgggacgccctatcccgccacaacccatatttctgaaccaagtagcccggatggaggagctaggtggcttgcaagttcattgctgcggccgcacaagtggactgcaaacagggcagatatccaaggctatgacattggtcaaacttcagggacgacattcattttcaaccagcttttccgtcaatgggaattttggaggtaagaggtgcacttcagcggatccatgtttttgtctatacgatccttaattagatacccttgtttgttttttcatgcacgcccatcatttgttgcccttctaagctggtaaacatacagcaccatctcaccctaagacatcggctcgtatcgagtaagcatttcatgaagctaatctcttgattcgacagcgcctggcgactctggcgcatgggtcttcgaccgtcccaccggccgtgtttgcggccatgttctcgcctggtccgcaaaaagcaacaccacctatatttcccctatggaggtcaccttcgatgacatcgcacgcacgctccgcgcctcggtcgtctctcttcccggcgacccgaaccgatccatgagctacgtcgaccctacctcctcacagtctgctcaataccgctaccaagcccagcggcttccaggagacttgggccgtttggcttttgggtctggaggttctcccggtccgcctgtaccgccctatccccatcattatcctccccctcagccttaccattcagcctatggacgtcctccacctccgcctccaccccctcccggctcccgagaagctcatgggcctgtgtacagtggcccagtccctccaattccgccgtcacttctggctgggccccgcaatgtcgaacgacaacttgcttgatttttccagattttggaaaatctagattatgggaataagtttttgagactcatgtcatattggcctgagtatgtcggtttgttatatgattatgttttacggatgttgaggatacccatgatggagcgatgtttgttgtatttttgttcacccgctataaaaattatctgacgtgaattattcgaagagcagtattcatgaaaggggttattctcgattggaagtagatacaacacagccattgagaacatactgatctcgagactagtgctaactcggaccgtcggcttcatggtatcaaccctgcccagtggtttcccttcctttttacgatcattgtggcccttgaactagaatgcgtgtactattaccatttgcaaccgcaatgcctaacaccatatcagagaggcccgaatctcccatcttaataaattatatgaaacgccaggcagacatagctgataattttgactgcgttccaaccttggaacctcctaggtagttagcagttatttattagctaccattagctaatagatggcggcggccacccgtagacatccaatcgtcttttatattcctaattctgggcccgtttcctctgtatatatgcccttgctattgtacaggccatggtatatcaaatcccctattgtattcaagccagaatttctacttttgcacaggctttcacgaatccaggactcaaacattagctaatcatttgcagaggaacatcccgatgaagaccacatagccttttatatcagtatttagagcaatagaagtagtgaactaagtatacagagagaaaaaaacagaaagagaatgggattcactacatgcatctgtttctatgagctattaaaaatgctcaatggagaacaaagaggatcgaaaaaggattatagaatgtcatgagttgaaaggtaactcattatgaatcacgcccgtcaagccaactgatctacatttctatataacttctacggacttcataatttgttggctatctatggggcattgtctcaagggatattgataggactgatgttcctccatattggtgcattgttctttcatgctctctggtccaaaataggaaatgacctatcaatagctcgtgacttgaaaggtttcgccatttctgtctatcttcgaatttctatgtaaacaacgatatcgactctttctccgcccgaggcaaacgcgtcttcgtcacagcgcgtccgttccttcatctctgtttacttcttctctcattcgttccttcatctctatcttcttcttttctctcatcttcgatattttaccaaaaacttcttgaatctcataactctcatatcttgtctttccttgaatccggtcatacctcagcggttccgcttggctctaggattcaacgatgcatcatttgcacactttccatggagatcccgagctgggcagtcggcccctcaaagaatggccatgcagcccggatcgagccatcgagcttctcaagacgttgtatgacagtgataagcctttcttcacgaagaaaaacctgagagccgtctccaaccaactcaatcgtcgctacaatacacgaaaaaagaacagtgaacaaaagcaattggtctctgtcaagggcctcagtggctcaactatctattaccaagtgattactgggcgagtgctcataggagcagggaagaacgaagactgggagatgtaattcgttaatgattgccatccagggctcttctggcacatgaccctagctaacacatccacaccacaacagggaggaaccaaagatccgatacctttgctatgagcagctcacttcgtcagtgaagttggggagcattgaactggttgaagccttttttccattgcaaattgagcattttatgctcacacgcgcgagtgacaccaagctgcccatctccaccgagtacattgagaaccccgtacctgtggacgtgactctccggaatattctggatatatggaagcacaccactgaattccagaagctcgagtccctcctcaagcttgtcacccctcgtaaagtcaccaagattgtcggtatcgcatctggatcaatggaatttggtcccgacgatgaggattgcacctatcgtagcgccatgcagcattccatgatgatcactatcaaagagtctattggaaagatgacagataaaaagatcaaatgctatgcccaggatcctcgctacaccgccgttgacacctgggctcttgcggagtataactgcgaggttctggaggaccccaaggctttgcttgaaattgacgacgactgtattctcttttcttgctgcccggctcttccattaaaggagatcactgttgactttgctcggcctgctatgcttatttgggatcgagttgtcgatgaaccaaaccatgggcggtaagtcttattctgatgttgtattcacctcatcttgcttactgactagttcgcctagccacaacccgaactccactcgcgtacagaacatgatcagaaatgaatacgtctgccatgaattctgggacttgcgcgaaattgggactgctccctttaggtctgaccttgttgcttacatccgccgccaggcggagtaagatcatcgcaaagatcatatggcaaattaaggtgtgtcaggggatgggcaatgtgtctatttggccttgggggaaatgattcggtttctatgagttttcaggggaatttgtaaggccaataggagtctctgattgagtgtgaagccagtttatgtttgaagaaagcatcctgatttccgcgtctgcacaaagctggagtcatgtaattgtacccttcattgtgtatttatgtctttgtttctctgttgatttagtaattaatctcctctccatgtcacaatggtacattaaacggggctttccaaccgcccttggtcctgtgaatggagtaaaagacatatggctgccaaatataacactgccaccgaagttctagagtatatatatatattgcagtgggggtttccagagtaggatgactaagcggctatatagatagttagcaacgcagacaccttccacttctcttctcagtagtcaccccatggtgttctcctctctagcaccctactactcccagtgacgactctgctctcacacctgtttcgcaggcagggttgtcggtgcccctatcctagggtcccctcttcaatatacacattccctaattttcatccagagtatagaaaggtgattgacaacaggcgtagttttagacaataaccgtggacttgggtcctagtgactttgggtcttagagaatcaaacccccgattgtgatcaatgcagaccaccttgttctatgacggacataacggacccacttggggtgacccacttaacgcaaccttatcccaaaaaggacctgccaacttgatatccatagttccactttgtgtttgtatcatgacgcacatttgatgatgatcactaggatctctagatattgtcgacaatgctctactaattttgtccgcctgtaattttcaatacctattcacctcgtcaaaataatattcctggcaaaagggggtttcgttggctgtactgaaattaaaccagcttttgagttgtctatcgcctatgccatgggatcacattgtatcgtcctccattgaggattctgcaacgtatgcgccttgagaggaacagctgtcggtgatatgatggggtctagtaaattagttgtgtagagtgcatgatcctcggcgtctgatatcgatgtgacaaggcactgagacacaaaacctccacaccaatgagttctcttgcgttggggctagtcaaaggcaactccagggcctatcaggcacatctagctgctcgtgctaattctactcctcctcctcctcctcgtcctcctcctcctcctcatccatactctcccattcatcttcaccatcgctctgttcgagatctgtctcgttggaaaggacgctaagcagctgtaacaacccggcctgtgtgcgccaggcatctgaggatggcaaatttgggccagggccaccaaggcttgcgctatccactgctgaaggctcatccgtgtcaccggaggcagaggattgtttagagaggttaggggccaggctgagtatgcggatgacttttgtaggaaagacacgaggaatttctccgccaggtattccgcctggaacgttagagtcgcgccagccgagggtctgcaatttccggtgttagccgttctgtttttatctttttgcaaagaagtcaaaaaggaactcacggtgtaggtagtcataatggcatcatcagccaacgccatgtaactgatcggcacagcaagctgtggtgcggagctggtgagcagcgagtatgaggcacgggcagggttcttcaaattttgaaccctattattgtcaccaagggcgacgacatagatcctatcttgaatctcgaacatcacacggtggttgcggattgataaccaaccaccaaggtcaaagcttgacccgtctgattgacattccagaatgtagctgttcgccgcaagactagcttcatcacggagagccttgcggaagtccgggcatataaagacacgaccagcgcgagagaagcccacgaagagatcgccgttcaacattcccgccccccattcatcatccccatgccagacatgatccgggtcatccggtggtgacagtggaccttcagcgacctcaattggtaccaaacaatcctttcggaaagctccgggtgtgaggggttgagttgttaggccaagtcgcgcagcgcctgctagtgctgcactcgtagaagcagaggcggtctttggaggaaggatgtgatatttttcggtcgactgggacggctttaaattgcctaagagtgcaccggattccttgctgtgggcaaaatagccttttgagcccatcgaataaatcacaatatcttcgctttgatccagatggccaatgccacccccctcaatcctcaggtcggcggtcaacttgggaggtcgctgtgtcatatcgtacacaaacccccgaccctcgttggagacaacacatagagtccaataggacaattggaaccctctcgtgtggcaatcatggcacaatgtagcgatacgccggaactctccacgcttagcaccttcaaggtccgtctgccaaacctcgagcaaatctccttcactatcgaacacggccattccatcctgatactccaagtgtgcgtgtgggcgaactccgtctccgtctccttcggcgtctagcacggaagggagtcgccagaggaggcggcccgtgtccatatcagtgacattcaatccgccaccatgggaagtggaaatgaagaaccggcgcttgaagtcggcacggaatctccaaatgggatcattaccgatttgtaccaccgattcctgactgactggatgcggttgggcccaattacgggccagcagtgtctggcgcttgcacaggtctttccatgatttcgtgccctcgaatattttgctaaagctgtgggtatcggcgaggaaggagaattcacggctacccccaagcggctggactgttttagcttcggatccataaatagcttcttggtgagtgccgtcgataaattggtgccaagccttggaggtcgcggtcagggacgcaaggccggaaatgggggtgaagtgcaagatttgcaggacaatctctgggggcaagacactgagagggtctactgtggatgatacggcagtcatattttcaaaaacaagcaatgcagagttgtcgcagaaagcaaattagagaggtgggggttcgcaatatttcatcgttctccaccatatatacgatgacgtagccggtttagacccgtggatacagcaaatagcccccggggctccaggggaagaacctagagccttaaaaattttaagcttaaattattttgatatgcccagatttcaatccgccatgtcctccaagtactagattcttcccatccaaatctgcgctgcaatgcctgcttcagttcaaggtacctcattcgctcttccatatgccgaacaaactctcgctggtctgtatagcgaataatatcttttccaagggcattactccgtacctattgtcatatatgacgaagtgagaggctgggaagagttgggttttgctgtaccccgcaagtacgagcgagtacatacgacaacccagcataaattgaaaaatgtcccgtcgcttggcacccaaggccgagcgcaaagcagcccgattacgagacttttctggtttttccctcttattcctcatcaaccatgggtaatgagacccttcagcagttcgctgccctcgacctcgactacttgattataggcggaggtaccgcaggtctagctgttgctgcacgcctcaccgaggacactggattccacgtgggagtcatcgaagccggcccatcggtcttgaacatagatgataatggcgcgatcaatgttcctggtcggtatggcgaaaccatcggctctaaatacgattggaaattcgaaactaccccacagccgggcctaggaggaagatcactaccatggccacgaggccgtatattaggcggcacaagtgcgctcaatcttatggcctggaaccggggtcatcgcaaagactatgattcctgggcggaacttgggaatgagggatggggatgggaagatctactgtatgaggaccagctttctgggattcgcgctctgtcttggatctcacccgctgatctttgagatactgaattccttccaggccttttttccgccgcagcgagaatttccacccaccgagtgccgctcatcagaaatattatcagtcttcctatgatccccaggctaatggaacgaagggccctcttcatacaactcatgccaagcagtatggtcccacacaccaatattggcatgagacgctcaataatctcggggttccatccacgcgcgatagcctggctggcgataatacaggtgtctggaacatggtgtgcacaattgatccagatagtcaggagcgcagctactctgcctctgcatactaccaccccatctcaaatcgcccaaacctacacatactgactgaagcaactgccatggagatcctgtttaattgcgacaatgatgattggtacgcagcaggggcccgagtacgctggaacggactggaagcaaacatcaaagcatacgaagagacaatcgtctgtgccggtagcgtgcaatcgccgcaacttctagagctatctggtattggcgatcaggaagtgttaagagctgctggaattgagatgaaagtccacagtcccaacgtaggggagaatctacaggagcatatgagtatggaatataaacagtgttccttgtgatctgagctgacgtgtttaagtgacggccaccatcttcgagatatcctcgacgattccaacccgagatgacatcctcaaagaccccattcagcgcgaagctgcggaccgcgcgtattacgcttctcaagccgggccttggactgtgatgccctgttcagtggcgtactgtccgctttcgaagatcctatcgcccaaggaatgtgatgaattacacacccaggccaaggaaatcgcgcgagagacaggaaggacacatgacgctattctggctggccaattcgagtacggtcatgcgcgcggtcaaatcgaatatctgttcgaccttggtaactggagcccatattttgtctctgagccaggaaagaaatacgccacaatgctgcaaatgctgcagtaccctttctcgcgcggatctatccatatccctgctatgggcgaacacaattatgaaaaggccacaattgatgataaacccgtgattgatccgcgatattttctggggcctggggagattgataagaaggtcatggccaaagcactcaggtggggagatcgaatctgccaaaccaagcccttggccaaactcattcgtcgtcgagtctttcctccccctgccaaggaagcagactctgaagagaaagtatacgaagagtttgtctcaaattatactgtcactgactggcatcgtatgtttcccctccaagattcattcagcaaatcactaaatatgcgtatagcggttgggacctgcgctatgggtgaagcagatgggaccaatgctggagttgtgaatgatatgctacaggtgcatggcgtctattgtctgcgggttgtagatgctagcatcatgccattgcaggttggggcacacatccaagccaccgtatacgcgattgccgaaaaggcggcggagatgatcatagatgactattttgctcgaaacggtccccgatgaatcttgggcttgcatatgatatcttatctatatggccttgtcaatatcttgcccggtaatcgcacaccaagaagggcgtcacgacagcaccactgattcatattttccaagttgtcattgttacacatgttccgagctgaaattctgcaaatcaagacttagtttcctgcgaacctttttcatttcatgcttagctggctcagcatggattgctccacactcaagcatcacccatggctatgaaacatagctgtgcacacacgcaaccctggagatgttccccagacgaagatgctccgtggcacatcggaatttttcaataaaaagaaacaccaagacttaggatggcgcggattgttaaacaaacagaccggggattgaaagcagaactccccgatcggctaaagccgacgtttaactctccccctccttgagaggggcaatcttcttattttgtgccgattgcccggggaattcattcggatatttttccagggtctcactggaaatcttattaaactacattcaacttcgtgagctaacaagacttccacatctcataccatcgtcaactatctctttgcatctctcatccgacacggaaactgattcccgcgcgacttgaatatataccggctcttgctcaacacaccatcgcatatatcctctatcctactatcctacaatgatttctggaatcgcccacatcaatctcaccatccctcagggcacattagaccaagccgaggagttctacgggactaccctcggactcacttcggcgccggtaccggagctccagaaggggacaatcttatggtattgaagcgagctatttccaaaagaaaaaaaaaaaaacatcattttctaatatcaacaggttcaatatcggctccagtggacagcaagtgcatattacccatggtgcgaccgatccccaagctagccggcacccatgcttcaaactgccttcccgtgaggaactagaagagattaagacaagcatttataaccatcacgtgcggggtggtcctgcagccccaatggctgccgataagcctggcgaggcgaactcaggtgagagatgtcttgatatcattcccgcgtacggtttgctgatcaactacagggacccaagggaaagaatatcctacacggttcttcgctcgggattttggcggaaacttgcttgagtttactatgtaaatattctgttttgagtcgagttctaccaaagtgcgggtgtgggatcgaagagaaacagtctaatattaacaatttcaatcgatatggagtcagcagtcctgtatggtctgtctaagcagctactcctctgagttcatttcagaattgctagggaattgtcgactcatgaggtagttagctctggtctgttcagaacaataaatgtacagccacatacgatgatgagcgcattgtggcgtaaatgcgggccaaacccaccaaaccgacgaattggagttgccgacgatcccgttgcacagccccacctgatacttggacgttgcgcttcccttcaatctcaccaacaacacataccagacaagaatacacaacatcatctactatgggtaaatcaacacctatagaaccagctccagcctatgatgacctgtttcatgagcgcggctcaagctcacgaaatggtgtaagtacattactcacccgaagggatgggtcataaagtccagatggttccatcaacatgctaatcaacccaaatgaatagtatgctatggtcggtcaaacagacgataccaccgatgaaacccgagacgtggaacagggtctccacattcatggcgtgcccgcccccatcgaagtgacagcggctggtgagctggatcaacacactcactgtgcggaatgtgatcggcagcaggaacgcagagagcgacgggagagttcccagaaagcatgtggcatggttgcgacaaccttcatcctgatctctttgttcctgatgatattaggaatcgttatcgttggagcttggaaggatgtccgcatgaagaagtcacacggttagagggtgttgagtttcttgaaatacctttgactagaatcatatcgcatagtagcttactgtttgttgtttacttcctttctttctgttaatcatggagagaacttgattttattgaatattgtattgaatattagaattgaatagatcaaccccgtagtcgtatataagaggatccaaaaccaaaaagaaaacaccatgcaatctctaacaagataaaaatccaaccaagagaaaaaccatcaagtcataatagatgtttctgtccaaaacatatgcaaacgaatctaagcagaaccgagatacttgagcacattctcacgttcctcaacaggcaacatagaaagcacttgctgcacaccgcgcagaccaccctccttgttcccaataaggagttgagcaacctcagacgcgacgccatcagtgcgcagagattcaaccttgctgtgaataaccttcttgttctcctcgtaccaagcagcaaccttttggtcattgtgctcgagttcctcgtccaacagaccagtccaggcgtgcagggtgcgcaggtgcgcagcacgaggagtctcgccgaaagcgtcggcaccgggggcagggggtgccgaggcggcaaccatgcgcttgacgatggtctcttcgctaagacggcggcgcagccgccagtagaagaagcggcgggagttgacccactggagaggcttgcggatggccttcttggcttgcatgcggccggcgcggtcgtgcaggtcggcgaattgaagtgcaatctgcatgtacacggggaggagctgttcctcacgggcggccatatttgccttgactgagctgagctgctcgtgggtaagggaggtgtcagccagggagcggcggagctcgccgtaggtcgcatccaggcgggccatggtgtccagttgcttctcgcgacgatacttgatgttcaccataccctcgggctcgaggacaccgccgcgggattcttcgtcggcatacatctccatctggtcggggttgatagtggggtcaacgacgacccaagatccaccgcggagctctccatgaggaggaatatacacgaagatgggctgctcgtacttgacgagagcgtcgacgatatacgaaccgtacttgagaacctcgttgtacatgtcacgttggccaccggagaatcctctccagttggccaggatcatgacgggcagctgctcgccgttgttgaagtcgcgcagagcttgggcggtcttgtaggccgagttggggtaccagacaccaccagcctcggtggagatcatctccatggagtctgggttggcgggatcggcaggggtgacgttctccaccgaacgagtctcgacggcgatcacacccatggggataccaccaaggcgggcacgaccgacaacgacggtgcgagcccagccaccaagggcctcctcaaaggagcccttgtcgaacagaccgggaaggaagccgtcgacgtcctccttacctccgatgagccatctgacatcataagcctgcttggggggagggaagtagccaatatcacggtcccaggtatccgaccaggggcgaatggggataggagcattcttcttgtcgggaacgaaggacatccactcaacgatcttctcaacaccttcgaagtcatcggtggcagtcatgtgagaaacaccgtttttatacatgatctgagtgccaccaagctgaaggttggaggtgtaaacctcgcgaccgagcagcttgttgatggcaggggcaccagtgagaatgatgggctggccctcaacctggatggcacgctgaccgagacgcacaaggtaagcaccgataccgacagagcggcaggtaacgagagtgatggtgaagatatcctcgtaagccttagaggtagcaccggcaatgagaccggaacccttcagacactcgacaccaagaccgtccttggcaccaatcacggtggtgatcttgtggcgctcctcgccctcgtcgttgatgagctcggtgatgacctccttcttcttgctggcatcgaagcgcttcttaatctcgggagtgaggtaaaggtacttgaaaccggcctcgggcttctccggtttgttccaagcaaccgagaagaagggaatcagttcatcggccacaccgatgcgggcaccagagttagcagacaagtagatacggggaatacccaacttgcgggcaagctcagtgcacttgtggaagaacttgtcttcctggggaccgaaagaaccaatctggaaggtgatgtcgttggcaacaatgatgaaacgtctgccgcgggggtactcgggagtacgggcagtgacgatccatccaaccataccgtgggtgttggtaccaggctcgcgagacacctcaacaaggttgtcggtgtcgtccaagaccagctcactgtagtcaatgcactccccaacaggggggcgcttctcatacagggaaggaattttctcggcaatcttggtccagctgttttggaaggcctggcggaaaagctcggggaaatcgtacacgtactgggttcccatcaagtgagccttgtagcgcttgggctgcagccactccttggtagggtacggggtggagacagggcgcagatgcatagatcccagcttggcagtaccaccaatgctctggaagatccactcgcccttctcggacttgcgctcgatatacagctcgatattgataatgaagccgtaggtgttgctgataataacacgcagggggtatggcataccggtagccgggtcggtgcaaaggatgcgaatttctgcgccagtgacacggaggcgccacagacggcggccgaagcgatcgaggaaaccggccagcgcttgctcaacatcgactggctggaggttgaatacaggagagaagttgatgaagatgtggttcagatcggagttgttgttgccaatgatctccagggcgtccaggatatcgttcatgaggcggtcggcctccgagatcagatactcagcggtggggatatcgtcacgcagacggccgggacgaaccacggcacgaatgaagtagcgcttgtcaatagtcttgtcattctcaacgccctttccaatagcctcgtagacgtgaatgttacggttctcggtgaaaacgggtttgatgttgaacttggatagacggccgagctccaactggaaggcaagagccggctcactgtggcggatactcacatcttcctcgtagtggggcccacggaaggtgaagtaaccgggatagacaccttgcttgccgcagatgaaggtgacacgacgaatacgacgggcaaggagctcatccttgttgtcagcgagcagctgcttcatttgttcgacaagttccgcatcttccatgtcctcgatatcgcgaatggcaatgttgcagactccagtgagctcactatcactcacaggcttaaggccggggcgacgcttgccttcaaggctggcaataaggccctgctcgatggggcgcttgatgttggagccaccgagagggaagacctcaagagccttggagaggagctcctcggcatcctccaagtactgcacgggaatgataacacccttgcgcacggggtcactggcagcgtcactcacaaagagggacatgtcgccgatggagttgatccgcttgaaggggttgacctccgtaattggagtgcccggtgcggacggctgagtggagttaagaacaccgaactcacgctggccgagcttgccaagagtgaagtcccaagacaggaagggctgctcattggaggcattgtattcaattccctcgagagtgtatgcacggtaggcacggcgaacgtagacttccagggaggcgagggtgacccaggggtcagcatggacgaagaaccgaggaagaacatcgaagaccgtgtacttcgagtcaacaacctccttcaaaacatccaaggaaggttcgcggtgctcccatccggtctcaccgtagcgagactcgacaacggaagatcgcagaatgtgctccatctgcgacaggcgctcatccagagatggcatagcgcactgaatcagaacctcacgggccttgagggtaactttggcagaagagcgagactcgagctccgtcaacttcttgaggatgggcttgaagtgtgtgccaacattctcgacgaggggctggttggggcggtacatgtccaaaatggccaacaccaggttgttcttcgaaccgatgcggctgtgtgagaggacgatgtggacaatgctggtgatgtcatctttgttctcctcgcggagcttaagaatgacatcctcgtcgcgaaggttatgggtagaaaacaatttctcaacgtcatagtactgttcgagcaagccaatgaagacattgtactcgttggacttcaaaccatccatgtacttgttaatgacctgaaccaggggcaaaagggtggccttgagaatctcagcatcggcagggccaatgttctcttcaatgaagcgaacgatggccttctggagctgcttggcagggaactcggccttgcgggccttggcacggtcaaccacgttctgcagctgagtatccagcctctgaggaatacgagagtgaagcgcagaggactgcgcattccactctccatagggaagatcagggttgcgcaacacctcaacgagatccttcagggtggtacccatgatgacctggttgtcgaaaccgcgaagaatgttctccaaaatgctgtggagtaggaagaatcgctgagagggcttgttaccgagaacggtaggtgagccaagctcgggcagctgaccagtgaagggctgagcgtgcttaactcgggaagggtcatccagggcgaggataccgaggatatcaccggcctctaaagtggcaccgggttgcttgatgagctgcacgataccatcctcctttgcgatgaggggcatgtacatcttcataacctcaacttcggcgtaagactgaccagagcgaatgtgctctccattctcaacggtgaacttgacaagcttaccgggagagggagagcgcagctgagtcggatcgttctcctgctccaagaggcaagttttgccgtcgacactgagacgggtggcagcagcctcctctttccagtaaacgttgtgactgcggccgctgaggaggaccagcaagccaccatcagccagagcacgaacaccgactgagcacttggaaccgttgatgaagaggtggtagctgtccaagctggcacgagtggcggtgaacttgtaacgctcgccttcatagatgaagtcgacggggaaaactgtcttcaagatctccttggacgggacctgaccctttcctagaccattgcggtattcctcaatgccagcctcgctggcgaggtgggccttggtgacggcaccacaaatgatggcgacgttctgatcgggacgctcagcagtcagcttgttagagataagctggtcaagccatccagtggtgatagtgttgtcctcgaatgcaggggtttcgagaagcttgatcagatattcgacagtggtgcggaaatcaccacgaatgctcaattccttcaaggcaacgaccatatgcttgcgcgaagcggatcggttctcgccgtaggcgaaaatgtgaccaaattgactgtcggagaaactgtggataccaccagcagtaccgacagagaagtaaccccagacgttggaggaactgcggaagttcagctcgtgcatggtaccactggaaggtttgaaaccctcgccaggatcctcggatgtgatacggcaagcagtggtgtggcccttgggctgaggacgacgctgggtctggaagctctcttccttggagaagtcgaagtcaatttcggtggaggcattggggtcgacaccgtaaagaagacgaatgtcacgaacgcggtgcagggggacacccatggcaatctggagctgggcagcgggcaagttgactcccgaaaccatctcggttgtgggatgctcgacctgcagacgaggattcaattcgaggaagtagaatttgtcatcggagtgtgagtagaggtactcgacggtaccggcagaaacgtatccgaccaaccgaccgaggctcacagcagcgcgctccatggcctggaaagtgggctgtttcgcaatagtcacaggagcctcctcgataatcttctggtgacgacgctggacggagcaatcacgaccgaagagggaaatgttgttgccgtactgatcagccagcaattgcacctcgagatggcgagcgttaccagccagcttcataatgaagataggcgatcccggaatctcgttggcggcggcgttgtacaaggcgtagaactcttcctcgttctcgacctttctaatacccttaccaccaccaccttcggaggccttgaccatgacagggaaaccgatttctttggccttcgccaaaccctcttcgggggaaaaggtgcaaccctttttatagacctcatcctcgactgtcacgataccgtgttcatcgagtttcacggcgtcaacaccggttccagaccagggaatacaaggcacaccggcgtgctgtgcaacaatggtagacgaaatcttgtcacctagcgagcgcatggctgaagctgggggtccaatgaagataatcttcttcggtgacgcagcgagagattcgggtaaccgagggttttcagaggcgtgacccctacacaatgagcgtcagtatttcgtttctaattttcctctctcggtcttctcggtatctccaagccacttaccatcctgcccacacggcgtgaacatccatccgctccgcaacatcgacaatcaactcgacgttggcataattattattattggttccaccgggaacctcgacgtattggtcggccatgcgaatatagtcggcgttggcggtcaaatcttcgggcgtggccatcacggtaaattggatagcccgctcgttgccgaaggtctcgtaagcccatttccgcaccgagcgaatctctttcacggcggcgataccattgttggcaataagcacctaaggaataagtcagcctcacggtcaatttcccaattgtttcccctcgcaaccacggttgttctttctatttcctacgtaccgatgtgataacggagtgaccttcgtgggctgccacgaaatctttcacaacgctaggaggtgctgattcaagagcgttgccaccgatgaaatgtgagggaatgtcctgtttgctgacagtcgagccgttgccatttgtgatactcatgatgctgataatcacaggtcagattcccgtataggaattgagattctgctttcgcgcgggatgcaacagcgctgattaaaaagtcggtaatgtacaatgctgggagtggcggaaagagcccgagtggtggacgtgcgtagaaaaaggtaaggtagagagagggggagaagaggagtaagataatcggcaggagtaagctctggggggaagaaaggccaagtcagcatgtgtagttcaagatctcggggcctgaagaaagatcgcgtcgaatgcggaattggcctgccaccggatagggaaagggtagcagtactaaccgggaaccaccaaaccccgaacaagaaattctatgtaagattgaatataggaattgaagagatgcagaactcaagttcaatcataaaaagtccacggggggaaaattgctgagaagatgattttctggaggtcccacccaagtggagatgatcccaactggctgtgattgattcccttgaatggccgaggacacatgtacctccccatactgttaactatgtaaaggtaccttcccaggaacgggctcccccaactccctggctttgttgggccgggttccactataatctgttgctcaccacttctgccgatttttgatttgcttttgatttgattttctttttgttttagaattaaatgttgaagagaccaatccaggcgtcactattaggtagtataaaaggattcactgctagttcactaccggtatgtaactatacatatcctatgatactaccccagtttggtcagcagcggaatcatttgaaatcattcaagattcaatagtaatggaattactcaaacttgggaactccaaggtcagactgtttgaacgatacagaatacatatacggagtacatatacggaactccgtaagtactccatacggagtacggagtacggagtactatatagagatcgataatctagattcaaaaatatgctccacgtcattgccaatctgagaatggcgtacacgctatcccaattcggccaccttccatcattcaacacgatcaaccttccagggtttggtgcaaattgcgtatagaaaaatcctcgtagaccaatcatattcgtgaccaccatattccaactcaacccattctccccagagccatggatctgggccacaactcaactacaacgccaaaatggacggttaacctacgttgtacatacaatttataatatggagcataacatcatgggtattattcgatcttaaatgaaaagacaatcgctgagacacagcttagaacgtccccagaatccaccgggggccatatcgcacaaatgaaccagacctggctggtccgagaccggtcaacatgcagaactgtacaggaagggatgtaaccagggcggtctgcaccctcactcctcttgcggaatgcagtcgatcacagtcaatcttagaagtctgtaaaacaaacgttgaaaaataaccctagcacaaaccacccagtcactaaacccccatgcaaattccataaatactagtggcgaagagaggaattaaaacgtctctcccaagtcgctgacttgggtcttcctgtttggcggcggcatggtaccaggtccgatgctagtcttgaagcttcggggagctgggatgccgctgatggttcgcttcttcactatgggggttggggtcgtagtcacggatgggcgttgaaactcctgggagatgtggggaactgttggcgtggcaatatcttggtcctcatcgataagagacatgccagcgatgttagggagttggccggcatgattgctaagagatgaccgaggccgccgggcttcggtcatagggtttgtcgagtagtgacccagtggcgttttggccccaggacgactcgaacaactttcgggccgggcatttacgtggacacccgagtgcacgctctggctgaaggagccgcggctagagaaactagttcggctgctcggacgactctcgcctgtccgtccgaatgactgatgacccggtggagggtaagatggggtgctttcactatctcgggctgaagaaccgaggctactgttactcagccgcttgcgagaattcctccgaacagtgatcgacgagggaacgatcggggtgtcgctgattacggatccggaacgaggggatccgcgagaggaagtgtcagatggggcgggaagtcgcgatttggctgattggacgcgctcttcgagcttctgcatcttaccaatcaggccacggatttggaacagtgagccagacttgggaagccccggtgggcgcgaagtgctcattctcgtcaaactgttgcgagacgaaatcgacatggagggagtgggccgactattggcattggcattggcattattaccattgctggtgctatatgcgccattgctgtaggcgagagacggggttcgcgaatgagtggtgcgcggttgagtccgagcgtgaagggttctagagttcaccggatccgcgccaccggctctctgtcgagggaatgttggcgtggagtttgcgtacgggttaatcgacttgcgaatgttcacagacgactcggagatagggggtgaaggtggggtagcggtagatgacgcaagggatgatttagcgggaggcgtggcaaatactggggaagatgtagcggtgccaggtgaacgatcaaagatctccacactctgtggagttgccgggctgcgatgatacaaaggagtgggcttgcggcgacgcaacccatgcccttcggtatttcgaagcttctcttggatgatctcggcttcaatcttcagatctgacagctcgtctcggagtcgttggttatcgatgcgcagctgctcccgctcttgctccccatttctcatttcctcctctagcaagaccccgcgctcaatgccgatgttgtatttggactccatgtcctccagggacgaggtggtgttccgggcttggcgctcatagtcatcattagcaacttcaatatctcgaagcttgagctgcaaagtgcggttcgcgtctcgaagtgtggtgatttctttctgaaggttgttctgcacagcgttgccttcggttttcgactgcttgtatttggtctgccagcgcaatgttagcacctgcacaattgtgagcaatgagcatgatcccttaccttccactcgtcgacttcatatcgcattgtgtcgagcttttccttcagttgccgctcccgcttttccgaagcttcaatgtccttctccatctcagcctccagctcccggctggaggactgaaagtccgcaagctccgcctccagttgttcatactgagctttgtaatgagccagttcatctctgtaagaactgctcgtatgcttccgttcggaagatggctcatcgacggccggcatcttcttgcgttgggcagaggaccggtcgcaaagaagacgtctggacgacgagtgtcgtccaaaattggcgaaagtcagtacagactgtacaccaggctgtcttgccctgcagatcgttccagcccctctcaaagactcataggttgtgtggtggcccgatgtcaacaaccgtgcgttttgataagagcccctcgccgaggcggtgacgcaagggattgattgcggtacctagtagtttgtccctctatagagggaggaagagaagatcgaaggatgtggcgaactaagatgtgcaaagctgggttaccttcgacccgcctcgtgtcgaaaagcgggttcgattagatcgggctgggagaaaccgatgttgttgttgcggtcgtcaggggccggtagatgcgctagtcctcatgtagcagatctgggctcagccacccaccgctcttttggtacgtcaaggcagaaacatattgcctcaggcatttaaggcactaacacgaagctaagcctcattggagctgaaagtgatcctgatcgacctcagccccgtgatctggactcagcagtcgccagtccccagtctttaggtctctagggcaatcaagtcggagaggtaagtagctttgtctatctttcaatatttgcactagaactctctgtggcccttcaagctccaagcacaagtgtttattgcctccagacactaccctggatgttatgcccacgcacgctgttcttaagatcgctgatcatcctgtttgcttccacgcacttgtttacccccgattattcgcaagctccatctatctatcccagtgttgaggcgcatcggctaaacgtgggatgatggtatgacatctgaacttacagtttccgccccttaagtagatcccgctcagtgaggctaaggtccagctcgatctatcaccatggcagactcaaccgatctcaaccttgacgatgcgcccagcgaccttcaagacatccccgaactagcaatgcaattagttccgcctccagaggggacataccctgacaagtaagatctcatcccgtcgccccttgcctagtgggaccaatatcaacactttatgtctacagggcctctcttctcgccgcagttcaggaccatggcaaggaacatggctacaatgtggttgtcaagtcttcaagcacgcccacggagaagaaacctggccgcaccgctaaggtgtggctgcgttgtgatcgtggcggccactatcggccacggaacggtctgactgaggaaacgcgcaagcgccgcagaacctcgcggttgatggattgtcctttcatgctagtcgcagccggttctcccggtatctggaccctgacagtgctaaatgcgacgcacaatcatggtcctattatcgagaagccgcggcaggtgcctcatcacaaggtccgcaagggccagctaccagccactccatatgattggccccatgatgcttcattcaccccatacaccactgcgcttgtgataattgacatgcaaaaggactgtgggtatttcggactattaccactatcagtgaaccaactggctgattttgtcctagtctgtttgcccgaaggatacatgggatatcagggttatgatatttctagcgcacaggctttgatccctcccttgcaaagattgcttcatgctttccgctctgggggtttcccagtctaccatactcgcgagggtacctagtgtctcgtgcttggcttttagtatgcttttactaattcatatcaggacaccgacccgatctatctactctctcaagtcgtgaggcatatcgatcccgtaacaatgcatccggcttgggtatcggttcccctggtcccatgggccgcctacttatccgtggcgaactgggccacgacactgttgacgaattgtatcctctacccggtgagccggtcatcgacaagcccggccgaggtgcctttgcacacaccgattttgagctcctccttcgcaacaaaggagtgaaaaacctcgtcattgcgggtgtgaccactgatgtctgcgtctcgacgaccatgcgcgaagctaacgaccgtggctttgattgtgtcgtcttagatgatggcactgcagccgccgaaccatcgctacatttgagcactatacaatcgatcaagatggaaggcggaatctttggaactgttgccaagttggaagacgtcattcacgctgttgataatttcaaaaccgtcaccatgaagaagctggctcctcagatgaccgtctaagtatgtactatttcttttagccggttggctatggacgctaggattggaagggatttctcgggcgtttgggactggagttatctcttttctgctgagatactgcagtgcgcatactcgttgcttttctttttcgaatcttttcttttgttgaattttagcgggccagggacttcattgatcccagatagcgtcatttcctgccagcaactttaggtgcaggacaatagccattgcacttctagttcagtttgtcgtgttaaatctaaaataacaagcacacttttgtttgtattacactacacgctagattattgaccttctccttgactgtagacttatttctctgttatgcagagcaagtcaaaataatgcaataggcacagagaaagagccaactcccaagagaatacatgccctaaaaacgccacgctcatgaacctagaactcccaagaaacagccaggctacagccattttttccctgcagcagtaatccgcgatctgaaaacaggactcttgatctccattccctgcttatagaatgggctcatcgccgtcttgacatagctctcgtatacctcgttcatgaactggcgcacagcctcttcggtctgcggggaggtcgggtttgcggcgatagagctggaggaggcgcgtgtggtcgatccagctgtgcctagcagtgaggaggagccaatgctgccgcttgtgctggttgaagaggggagatgcgggggttggtggaggaggaggaagcgcgcgccacttggagtgaggaaagccgtgatgtaggctgctgccggcgggtaggtgtcgatatgcttcaggtaccttttgtgataatgtcaggtttggaggtttgatgtgggatggagcgcgggctgagggtggtttcctctgtgtttacatgcccctcgtggattcgaaccagttcccagtagccatttgacatatgggatagcttgttagacttacattccaccattggtccattgcgcttcttccaatatgtccagacttgagtggatgatgaactggttcatgtactgcgctgtctccggaaagcggaagcgagcaatgccatcaccaccccccttcgatgtgccaaaggcgatgttgaacaaaggtgtgtcagtgggtgatagaatggtgaagtagtaggacattttgagcagattgggattattcagggttgacatcgacccaaacatggccgaggagctgaggattgcgggtttactagtggcccccatcacgtggtcgataagaaatgagctcgtccgggtgaaggatgtatacacttttgatgaaagttgaaagttgaagaatattgtaataatttgagttctgttcaactacatatgcagttcaaattcattcgcacggtctttaaaggatctttgggtgtgatcttgtttaaccaggattctcgttcattatatatctttgatcgttacctataactgaatttgatacgcgatttgtcgggcccattccagtccaattaagcaccgggcgtggcttgggacttaatatacaactttacctaggagatagtcaaaggaataaatcgaagtggccttttccgcttgacagatattagcataaaatatctatatcttcctgtctttggggcgaaagatttagccgcaaaccgtagaatacccgaggaacggggtaaagtcgatgaaatatccgcgatctgcgcttcaccagtgactatatatgtttatcaccacatgtacttgcccctgagagctagccagccaccaggcagcatccgctcgtagcttctttttggactcagatactccgacctccagaacaatcatgggccacctgtcatttcgacctggaggaagttgttcggggatccatgaaccatccggttctttggagcaaatgtttccttctacccttgcagttgtaagggaacatagcgttcttcccaaattcgcaaataatatagccctattgaattctgactggagctcacccacgatggcatcatgcggtctgcctggtatggtaacgatcatggcccgggtgtcggggttgtagagctggcggcatcccttggagagttttagatttgctacatctggtggtacattcgtgaacttggcgtatgctgtcaccagattcggggtacttcgcagacgagacagaatagaccgaatgctccgggctgatgatccgatcgcttccaccgcacattccacatcgaaacagtcaaagatcagttgtgtccatgatctttccgataagaggtgaagaaaaaatgatccatttcggtacgattcaaatcacactagccctggtaggtctcatggaagcttctggtaatcagtcaccaagtcctgcgtgagaaataaccagttagtcctatgagatggttattatgacatgcagttctccccgcaaaagccaccagcacgtgataaactgataactagccacggctttatcgcggccgatcacggtcgatcgcggtcgcaacctttgaccttggcaagcacttcctgccaaacataccagtttcgttgctatcaccccgggtacacaaagccctaaatctgcttgcaaaacttaagttccgatatgcccacaaatctcccctacggattgaaccttccgaacaaaagtctcgcggcgatgaaaccggggaatgctctcgcgcagaaaagaaagaacatttttgatgacgactctgaagatgaagaccagcaaactggcgatggtgcagttgaaatctcaacaattggaggactagaagagccagctacgaaaaagaaacctttgccaagcgcagggcctccgccgaaacgcaaaattcaattcggtagcggtcccaaaccaacagcaaaaccgctcagcaagaactcgctatttgcagacgatgaggatgaggacgaggaaaaaaaaaaagagcaacaaggcgcaatgaatcttggattgaaccaggcgaagtcgaacaagccaaccgctcctgtccagaaatacaccaatctcgcgtccatgcacagtagcaacatgcaggcaaaagcggcagaagaaatcgacccattgatctactcatacgatgaagtatacgacagtttgcacgccaaacccgccaaggcctcagtggaaacaaagagcgaaacacccaagtacatgcagaacttgctacagagtgcagagatccggaaacgagatcaactgcgggctaaggatcgccagctagccagggagcgtgaagctgaaggtgatgagttcgaggacaaggagaaatttgtcacctcggcctacaaggcgcagcaagtggaactgcggaaggcagaggaagaggaagcacgccgtgaaaaggaagaggaagaacaacgcaaaaaaagtggcggctctggtatgataggattctaccgggacgttctgtcgcgaggagaagcacggcacgaggagctcattaaggctgcggaagaaactgctcgccgcgtcaaagcaggcgagatcatcggggagacagaggatcaagaggtcaagacggatgcccagaaagcgcaggatctcaattctcatggaactcgagttgttctgaatgatgagggccaagttgtcgacaagcgtcagctgttgtctgcaggactcaacgtggcaccgaaaccgaaatctcaagcacctgccgccaaatcaggagcttcaagacctaccgctggacgaccaagtgccggtgctggttaccagggtggccgtggtgcccagcgggctcgacagaccgacatggtcgcaacccagtacgaggagcgtgcgcgacaagaagaagaggccgaggttgcaaagcaaaaggagatcgctgaaaagagtcgcagtcgcaagaccgagaaagatgtgtccagcgctaaagagcggtatctggcaagaaagagagaacgagaagaggctgctgccaaggaaaaatcgaagggggcttaagtgtatgcaaaaggcgggctggatgtgttgcatccatggaattttggaatatttaatattgcatagcgctgggggagaaacttgtacattactctcgtgataccaaaagagacccgactttgagccatagggctgtttgctatggacgaaccttgccgtagaatctagcttgggactataaatatgcttgcccctttccggacaaaatttttttttttcattcgcctcttgattttcattgctaacacttggtaagttctatcgccataactactctacactctcggaggaaccattgccaagacctcttaaccccggcttacattaccagcttacctcataactatcacatgaccccacacgggctgagttaatccggaccgaaagcactcgctaagccgccccacacaggtcgcactcccaattttgcactcccaaatcgagattcaagaatcgcttcatcaccaaaccacttccatctcccgtttatcaacgtcaatcatccaacatgggtaaggttcacggctctctcgcccgtgccggtaaggtcaaggctgccactcctaaggtgagttctcttcgatttccagccaacgacactcgatacacgatcgcagtggccatccatcccaccagcctttttaacgacgattttgcatccaggtcgagccccaggagaagaagaagaaccctaagggtcgcgcctacaagcgtattctttacacccgccgtttcgtcaacgttaccatgaccggtggcaagcgcaaggtacatatcgaatgactcaacccacacaaccaagcacaagacattctgcaaatatccacgaccacacaatacgaataccgtgaatggaggacagaaaggctgaccaggcgcaaaatgcagatgaaccccaaccccggccaatagattattcaagtcgttaaaacaatcacctgagccgcgatcggctagccgagttctacgatgaaaaccttcgcatgaccacggcacgaccacggcccaaacgaacgaaagcataccagatatggctggtacttgtacggatgatatcacgcttcttcgtcttcacttgaattttttttttgctggcaacggatgggtttttttggaggctgactcgcggaaatggatgaacacacatggtggtctgaggatggaaagctgtggctagatgtgagctgtctacgggcaatcctcgcagcctggacttcagagtcacttttcgactcatttcataggctgtcatgaattgcatttccgatccagaaatggactctacctctttttccatgcttttcgggttatctttacttgagacagtgtctaggggtatactgagagcttgcttttaatcagatgcctgcctctccagggccgatgttggaggtgtagaacaaatcaagtgggcccttcaatcgtggaacttgagcccctatgcagtttgtttcactgttcgttctgttggccaaccaacgacaatataaagcccacagtggctgtacaccgaagtatatatttgccgcaaacgtgtcagaactcactagtagtatataagtcaagttctcatcttgcctttgcaactttttgtcgcactatggggtcatgaaacgtgcgcgggctgatagaaattagtggagtcttaatttttactatagagaacgtcaaaagggcggagcacaaggatctagaattttatactatctacaagaatagtgggctcatgtctttgacaacgttggatttcgataatttgattcatttggcccaagacgaaatattagtcccaggtatgaaataacatcaatgcgagtgtcttattgaatgtcttcttggtgtctttctccccttttaggttataactagaagctaacctacagatcacgaaataattgcggtgaaaagctaaatttctatgcatcttgcgcatataatatgcatttgatatgacgagactggaaggaaatgttgggaaaagagggaaaacagataaaaacacactcagaaatcagaaaaattcagtttgagctgtttggatttcgtaggacagaacaaaaagccgtcactgaaaactatagaaggtagtttgtggtattgagaatataggcttagggtcttctgcaaggcacgcaggaacaatctcaaaggtccgatggtagtacctactaatgatagcggcatcctcatttagacctgggcttatgcctcggagctcgatgtcatgacataaatggcaggtgatcagacaaataggcatgacctcaccaaatcaatgccggatcatccggagatgatgacttcccaaacatgtttggtcgaatgattgaatattccacggatcgaaggacttctaaggtgtatttaaggttattggaggtaagatgactaaggtgatattggccagtcgctgactgcaatcctgaccaacacatccacttgagacaaatacaggacacaaagagcagatatccagacatgtctaatcgtcagacagtggagaaatgaatcgcttaagggccattgagttcaactggagtctctaccccacacattgccatgacatcgattgaactcaattccgagcccgtggccgattgggaaagattttacatattgtgatatggcaaggcacaaagcgatgaacgatgtcaagttagctaactgagtctacaggtattgaaccggaaattgcaaaataatgaagggttgctggctatccccatctcaactggagaatacaaaaacattagatacaaagagtgaatatctgcagtggacaccagctgttggaagatccacatattccaccttcttcctttggttaagcatcatcgacttctgatattatgctgtaccagatatcgatatccctattgctttttttggatcaagctgcgggccttggaatccaagcaaaggcatgggatggcccagctgaataccgagcaagctgttccctcatacgctcacttgtgcttggaacccactgctagatatgaacgccgtgtggatatcaccaaaataattccatgatgcaatgaagagaaggacggttgctaatattatttaggtccccccggggccctagttatagctcggtccattgttttatattccatttactattttcgaaagctgaacaaacacgactgaacgacaatacttgacttttatttttatttttactgtctacctattaataatttattgcaccaatttttgtcactcatcaacatgttcgccaaggccaagggaatcctcgataagagttcatccatccgtgatgaagttaacgaaggcaattaccatgccgccaaagacatcgtgaccaaaggtgaaaccaccaaagaatcgaccagccagggaaacaaggccaatgagatcgtcgataaaagctcatccgcccgcgatgaagtcaaccaaggcaattccaatggcgccaaggaagttctcacccaaggtcaaaacagcaaagaatcgtctggacggggagctgtcggcggggcatcaatcagtgctgctggaatgaacaatgaagaccttaacaaggggaatgttcaggagaccggaaagcaaggtaggaaaggacgggtcggccaagacaacaccggtacctctactggcgaaacgaaggtggagcaacgagacattggcagcgagaagcaagaagttggccaggaacagcatgtcagcatcattacaaatgaagatactggctctaaacagcatggtcacagagacaatgtggcggccggagagcttgaacccaatgacgacatccgcaagggcccaatcacgatgccgggaaccttccaagaaaaggacttccacaatgcgaacggtaaagaaactatcgttcagagaggaaccaccagcgaagaaataccagacaacttttcttatgattccgcgggagcaggaagccaaaaaatgactggattagccgtcgctggaggtgaatctcgcaaggaacctattgacaaagaggtccatgacaacgagaacatcagctcggacgtcctcaacgatgggaccactagcaaagacctcccaaagaaactcgtcgacgaaaatgttggaaaatatcatatcgacaaaaaacagcttgacaagcagggctctcagccttccgagaaagcagggacaagcgaagttgctgccaccgatgctgccggcggcggctatggtatgagcaagggagccgtcaaacagacctataccaccagaaagcagagcaagggacattccggctctagcaccaatgcagccacagcccaaggtcctatctccgcaagctcaaagagtaacgttgcttctaccgtgggagaacatggccgtgcaagcggaaaaggggcggccgcctcaaaccagacgaacagcgggggttatacttatgcccgtgcggtatcaaatcaaggcttaactccgaaaaccccgacaagcacaggaaattccaccaccaatgaatccaaccaaacaagtggtctacgttctaccaccacgagccaaacaaataatgccttctacaatgccggcgccactggatcgaacaaagcaggcatcgtcggtggaggagttctaggacttcaccaagaaggtaattatggtatatccggcaatgacaacagcggagtcaatcaaggaagcattgctgcaggaggagggactcgccaggggggtgtctataatacctccggcaatgacagtttcagcaatagagtcacccacgccagctccggtaccaagagcagagccggaaatggggtgtcttcgaagcgcattgttacacagctgagtggttgtggctacaaactcactattcttcaagaaaaagttcaggctgtgtctcagaagtgcaagactcagctgggcctgtttcccagtgagatcagcaaacgcagccccaacgtagatgctttctttgatgccgtggcagctgaacgtctccgatggatgcctcatgatggtagcagactcgactgcagccttagatgggcgtctagactggcgtatgccgtcgacgctcttcgggagtccgtcggagtctttgcgcctgctgccaatgaggcggcaacgctcatctggggattctctgtcctccttttggaggttagtcaagttgaccggtgatatttattttagatatggatgctgactattgtacagtcagacatggacaatacggatgtcttcgagagcgtctttggccgatatggccgggtcgccgtcggtatatatttgcttttgcagtacgagattgcatacaaatcctcgcctgaacttcagccatatgttgccgcggtattcgcagatttgcttgaaatggtcagtagcacggctatgagctgtgtcgagggatttaaaagcaaagagtccgatcagattattggacgcaacgttgatgccgcctttttgacctacgccaagcgcttttctacccactggaattgtgttgtcgatgcccacactgcaaagctcgtggaggacagtcccttgatttactcttcgcctgagctgggtagcttgcgtcaattcctgggagtacaggaccgccctcttcagttcatcctcgactctcgcgctcactcgcttgctgagggatcgtttgagtggttcaacaacatgctctacgatttcagtgtcggaagctcacctgttatgctaatttccggtggtcctggctcgggaaagagtgcattagcccaatgggcggtcgaaagactacaggagtcgggtgaacacgatagctggaatgtgatcccctacaccattcgtgagttttacccttagatttttgctgatttgctagctaatctaatacaggtgctgatattcctgtcgctactttacctctacgcatcctgaagggtgtccttcaccagatgttggatcattctgtcagtgacaagcagacccaagaggctatcctggttgaagtcgcaagggcagcccaaggggcgatcgatggcgctggagatgacgcggtagaagcaagcctttggaagggtattcatgctggtcttgctacaaacatccagtacatgtttgtggttgacggcatcgaccagatcaggggtggtcataccaatgccattgcctgtcttgatcgcttctgtgagattctctcagaacagaatgctggatctaagatgattgctttcacccggcccctgagctcaaagaccgactccaaaggaattcagcagttttccatgcagacctcacagactaagagcgacctcatagcctatgtcgacaagatgcttgcatctagcgccaactttgacacacacaagggcaaccagcttcatgccgctgtgtctgccattgtagcccgctctcagggctctttcagttgggctgaaatggcggttgcatatgctaaacagcaaaagaccttgagccaggcggttgcctccattcagggcctgccgcagtcgatgccggagcttattgatttccactccaagagtcttgaccttagccagcagggtactattagtgttgtttcttggctcgcggcagctgagagacccttgctagtcgaggagattgagcatttgctgaacgtggatcccaagggccccagatactcctccaatcagccctctagtagctatgacatcttgaatgctctaagcccgctggttatgacccgtgatggtgtggtctctttctctcacacctgcattcgcgatcacatcatcaatcaggctaagtcgtctggtggggagtcccagctcagcatcaaggatgcacactacgacttgctcaccaggtgcctttcctgcgtccagttgagcgtgcgtgaggaggttgatatttccatggataggctgggtatcgaggagcgcaaccatcttttcgacaagtatgtcgtcttggagtacaccgcacgatactggctgtcacatcttctctcttcgccaattgtcaccgatgacgaagagttccaatttaattcaagattcaaaaagctcatgcctgccaccgttctgttcgcgcgcctcgagctgacttgccgcgagtcccaattcactcggtctagcgtcgtggagctgtacagacttgcgagtgacattcgacgattggtccttggcgagaaatcgatcgccctgctacaaagcctgattctcagcgcacgcgtgtccaagatggcgcatgccagccacgccgatgagacctgctacaaagcgtggaagctaagccaggagctcctcggccagtcacacccgattacaatggcatgctctgagatgatgatacagtcattctccgaacaaggcacgattgcctctcagcaggaagacatcctgaagtccttgatcttgacagattcggagatcacaggggttgaattcaatcaacgcctgaagtaccttggaatgatcgtcagcatgtacaagactcacgacgacaaccaatccgcgttgttcatctcaaagcacttctatcagcaagttcttcagaagtatggtaccaattcgcaccagtcatccgagacagcagatttcttgaccagtcagttctcgacaactggaagcgacgaggtgagccgtgacattgctagaaccaagtatgacaatatggtgcgcactatggaggtcactgacgagcgccgaatctcctacactcttcacatggccaagatgtatgaggaccagggtgaattggctcttgctcaggcagttctttcaagcctgtgggcgggtctcaactcacgcgacattgactcggttgatatgatggacaaaaagtctaatgtcgcccttgtgtactaccagttccttcgtcgtcaaggtcgaagtgatgaatctgaggtcataatccgtgaattggttgcagatctcgaggttactggtattcactccgaggagatgatgcagcgtgtgcaccttctccgcgctgagactcgggagatgcttatgtacaatctcgatcgctccttgtcaattcttatgtggcgctactacaaggagacccaccaagagtactcagaggaatcaaccgctctagcgctctcaattgctcagagcatggcaaatgcagtctctattgaggatgcatcctctctgtcttctcgggaccgcaagctgctaattgagctgctggacgtcatctcggccagtcccgacaatatgactgtcactaccttgatcctgtgccacaaccttgccagtatctatgtcagtgagggagattggacccaagctagtgaatgctcaatggcggttctgcggcatatctggcccaccattgaacagtccaaatctcaccagaagttctcgccagagcttgcaccccccgcggcagatttggctttggtgttggcctactgtcacttccgcaggctacatttagaacatgctgcagttatttatgagaatgcggtcggttctttgatctcttctgccggagttcccgtggcgtcggtgctagcagttgccaaggctgccgtcgagttccacgaaactacctatcagttcaacaaggcgctgaatttgctccatactatcagcaactacttggcagctcgtctcggagagaagcatgagcataccatcaacaatatgtatctcgaggctgctttggcaactcgtctggagaagaactccgaggccaagagcatctaccagcgaatcttcaaggctacttcccatcaggtcacgattgttcccgagggtatcgccgctgcaattgctctcatcagcctctacgataaagagatgcagtgggattctgctttgcatgtttaccgagctctttggccgaccctggttgttgaagacaacaaggcagattcctatgaccatgcgctagtggaccggatgttggagaagacttatttgggctatatgtctattttgaccaataaaagctccaacttctctgagcggtatcgggtggcctctgagtatgtaatgacctgtcgccacttacacggcgcaacaagtgagaagacgctcaatgccactttactccttgccgagctgtgtgagtcgagcgatgcacatgttgatcaagccatttcgctttacaagttgcctctggaaaccagcgagtgggtggctccttctcagtcatcgaaggggctagaccagatgacttcgtcgctgcctatcaccctcaagcacaagttggcacagctgtttgtgcgcaagcatgattcgactatagaagcccgttccctctacactgaagagtttcagctggccaagaagaatcagggctacttttccaccacgactctctcctggctccgtgaacttgccctcgcccattcgcgacaaggaacttcctcttctgtccagcagggtaacgccattctccacgcatactccaccgatgttttgcatgccgacggtgacactgacacagtgggtgactgggcccgccggatcgcaagtatctacctcgagtgcggattcattgaaggcggtaacaatctccttgacgaactccgccaccgcgtggtgtacagcttggaatcttcttccgcggtggatttgagcgatcgtcgcgatgccgtatttgttgctgccttcgaggaagtctttggcagacgtgccagctacgaccaaatcatgtctgagatggctcgtgagatgaagacctctagggacttctctaagagtctgtctggtcacgatttcattcccactttgatcattggccacaagctctacagtctccaggttggccagaagcgagttcgcgctgccaacgacaccaaggacaagttgtacgactacttctgctccaacctgtctgccaccaaggtggccgacaaggagatcgtgcagcagttctatcagatctgcctgcgtgaggtccacagagaaaactatagcatgaaaatcctcacaacgaccactaatctcgttcgtgacttgtgcaactcctcccgcttccaggaagctaccatattgacaggcgttttgcactccttcctgcatctgaccgatggtctcaacaaccaagaaagtatcaacaccgctattcagctctgcctgtacctgggcggccacaaggcaaccaagtgtaccgacgaaaagacctaccaagccatgtccatcaagtccaagctgctgctgcaagagatcatggcatcctcaaaatccatgggtatcgagatggtcgacctacccttcaaccaactcaacgacattatcacccttctaggccagcacgagatgttcgatgagctggaagccattctcacccaactctggacctcacgaatcgtccagcgtacctggacaccggatgtggtcgtgtggatcggccgacgtctagtcgaaacccgcttctgccgcggcaacgtcgagtccgccatccagttgtgccgcgacatctgctacaacctgcgccaggtgtggggcagctgcgacccggttacactgaacatgaccaagcttctttcagccctgttcacagcctcagagaaccaccagtctgcagcgactctacacgaaggaattctgtacgatctgctcagcgactccgaagcagagggccatgccaatgttgctgataccgcatcgcaacacatggagctactgcgccgtgcccaggcacgtctgggaccagactcaaaatcgaaccgggcttcggcgcatgcggaactgtcccaatcagttgccgatcgctttggtgtgcagtctgagcagatcaagaatgttggcgatgctaatggcggtgagcaattcggtgtttggtcgaagccgagacggtttagtatcgatgttgatgatatggaggaggagggccagacgcatcacaatcatctgcgtgagtccagcggtgttgggttgagtggtagtggcactcagagacgtatctcggtgcaggctctctaagtacactgggggatattttttttttatatcagatatttgtatttcagttcatgctggcgtttttggatgtttaacctgtaccaaattgtatacctttgtccgtttcaacatcacgatttggtaaatcacttgtctaactagttatcggcttcaataatctgactcttttagctcatcatatgtgatcatacaaaggttacactacactacagatgtatagtattgggatggcttaaatcggggcaatttctacgtagagtgggctggctactttatgaactggaggaaagatatttctaagtctaatacatcatctgcacaaggtacatacaatacccaagagtaataggtaattatgcttccaccacatcggtgattcgacacgcatagcagtttggttgataagaaatattgccaaaatgtacactgaccctgccggtctgtgtaggaccacaccgtgatgatgttgaatgaatgtagtttaaacccgaaacccaatatgtgtgttcatgcacgctagcacaaggaaaacaaaggatcatatgcctagtgtatgatgcaaatgatcaccagagccgaagcctggtcaagcggtcaatgcaaagctgaggcccatcaaccccatgcctccgacagcgaacccgatacccattccgcggtgatgggtgagcccaagtccctcgctgaaaagttgcaacgcaaccgaagtcatgactccggcggtgacggcaaacatacctccatatataccccacgagggaccagtggcatcgtcgctaccgcgttgcccagtgctccagatccagagcgctgcgagtccagcaccggctggttgactgatacctcctaggagactagaccagaacattgctctccagcgggaattgagggctagatagagcggaagtgacatggcgaagccctccacaatgttgtggataactagagccagaaatactgtcataccgagggttgggctggcgtggtttgtggcgtaagtaatgaacccctctggaagcttatgtagagcaatggcgagtgaggtttgaagcccaatggaaaggaatgcatttttaggaacgtgatggtggtgggggttgccgccggcagatttgggacgcccagaatcaatatcgtccaggtagctatgagattcgtcatggtgatgatgctcagaatgcggacgagatcgatgacttaaatgtgggtctaaaatgggagacgaagtggacgatcggtgcatgtcatgctgtacagagatgttgtcaaaatctctcccttccggagtgggaggcacatgttcaatgtcgtcaattcctacgcgggaaatttccgattccagcggcacggatataccttcacaatgcagcaagtttggtcgcgcgctctcatcgctgttgggtggtggaagcactttgttgcattcgaggccacaggtttgagaaaccccgaagcaaggcccgtcctcgtcacaggcggattttacgccacccatgaacgacgtaatgcggcgcgctagcattgcccgcatcgtgtcgcggcgtctgggtgccggctcgatgtgttggctcgcttgtactaccgctggcgttgacttgaatgaagatggcttattatgttgcaacagcggtgttcgttcggtatgtccatttgtatcgttgtggacatggtcctcgtgtgcggcctcgccgcgctcggcatcattttctgactcgtcatgggtatgggcacagtcgacaacatgagatgggatgtaacgatgtgcgaacgcggatagtatttgaatgccggccactccagcaatgaaaagaccgatcaacatatatgcagatacagcgggagagaagccggcgcgggtaaggtactgcttggatgtgggaagcatgctgtagagggaggtaaagagctgcctaggattaatatagttcactattcctccagaataatgcttaccatgactccagcactgagacataatgatgccgacaggaaatgactactgttggcgatctggaagctcttgcggcgggagaccacttgaaccagcacatcgacgcagatgatagaggaaccaaggacgcatgctgaagatagttagtggctaatatttcaaagactccaggcgacacttaccgacgcctgagacggtgctcatcacccatccccgaaggtcgttggcagacatggcgtggggagttgaagaaaacggaaacggtgatgtaattagcaatcagcgtggttggcggtcaagactttgcctctcttcctcactctagaggaatgaaaatatgacgatattcatgatgggcatttatgttaatcacttgcgttgtctgaggacagtgcattccgtccccaaggttctcactgcacctctgcaagcccccctcatggctgggatctgcgatatcgaacaaacgatctggcatcgtgaacgtccagtttgagagtccctaggactatgggatatggaggaatatttcctatctgagggtcatagatactgcctttcattgcaatctgtcctgtgatacttgacactttctcatatgaaggtgcacacctggacatatgcaggggattatgcaactgacagtatctggtgatttgaaataactttagactcaccggactcaagagaatgacaagtatcacgagaggcaagagaacccagagaacccaggaaatccagagaatatatatacgacatctcccatgccttggaaatgacaatagttccgggccccatgtgatgtgattggcccgtgactccccatcttttttgctgtcttcgtgtttcggctctctcgacgctctagcctctcagctctacctaggtaaatccaaggggcactcagccatgtccaaagcaaccctggccgtcatcgctgccgccagcgcagctaccggagctggtgtcaccgcgctgctcttctccggcaaatcctcgaagccccaacaacaagagaccctctctccgacaccgacaaacccgggcctcaaggtaccctcaaccatccaggccccagccctggcatccaagcgagccatcggccccgtcgacccagcaggaatcctccagtatggtttcccgggcccaatcgccgacgagctctcttccctcccattgcacggcgcctacgaccgacgcacacgcaacccatcttgggtcgcggaacacatcacgccagaatccctagggattaacaacgccgacagaaagaagagtaccttcttcgaggacacgaccatcccggggatgttccgcgctaagctgtccgactatttccgctcgggctatgaccgtggacaccaggtgccggccgcagacgcgaagtggtcacaggaggcaatggacggcacgttcgcactgagcaatatgtgtccgcaggtcggcgagggcttcaaccgcgactactgggcgcattttgagactttctgccgtgatctcgccaagcgttatccctctgttcgcatcgttactggccccctgtacctgcctcaccgtgacccggatggaaagtggcgcgttaactacgaggttatcggcaacccgcctaacgtcgctgtgcccacacacttctataaggttatctatgccgaggatggcaccaactcgcccacgagcaaggttgcactcggtgcttttgtcctgcctaatgctcgcattgcaaatgataagcgtctgactgactttgaggttcctctcgaggctgttgagcgtgcttccggtttggagttcggctctaagttggacctcagtcgtcgtcgccgcttgtgtcaagaggtggcttgctcgatcactgtgcgcgagttcaacaatgctaagaagcgctcttgagcttgatgtcacagaaatgtgaggagagagaccaggcttgccttttgacttctcgtatggcttcactgtattctagaaacattgtatttgcataattcgggcgttaataaccgctccgggcggcaatataaggatctttctttatcgtacacataatggaaacctgtgatgtttcatgtttctttctcgcttccttttattacgaagttgttcagcactggaacgcaaccccggtcttcttccccatgctcccacctttgctagcaaacccagtcccctcggaggagatctccaccagaccaggctgaatagcatccctatcctttttcttagacttcttgttattcccattcccgtgatctggttgtgacttcgccgtaagatctgtctcacagacgaaacataaaacctgaccatggagagctgcagtcttctcctgctcctctttcgaggcatgtggatcagggatgtggtgttcgtggggggtcatgaatttcgttacacacggagagcaaatgacatgcccgcagggctttgtgactgtcatgagacataattagcaaaacccaatggctgtaccaacttctactccacatacgcatcgctttgagcccattgcttaaatttttcgtgcaactcggacacaccctagacacagtcccatcggaagccttctcctccgtgaaattaacctcaacaagcgacttgagcgagtagctatgtcggctctcatccgtcgagccaggacagacaggcgtcaacttgacggtcttgttggcggcgatttcattcgcatcagtgttgggtgttaaagatggaacccagaaagacgggagagcagatttgctagccgactagagcaaatttgttagttcaaaacaaatctccaatcgaagaccgaggcttcaagcttcaagctccagcccaaagaatgaccacaaaccttctccatcttcaactccatcctcaacctctccttctcctccccagcaacacgagccatctcctcctccccgagctcaaaaaccctcttcctcttcccatcaacctcaacctccctagccttgaacttctccaaagcctcagactcctccgccttgcgcttcttcccacctttattctctaaacccatggaaacaagctcgaaatccctgagatctctctccttcatctccgccagcgagcgctcctcatcctctgcgatgcgttttctcgcctcgtcgcgctctttttcaagccgcttgatctcctgccgttgagagaggaggtcgttgatcgcacattcgcggcagaagaggtcgccgttactggcgcatgcgactacaggcgcccgcgcgggttgcagacatagacggcaggagccaaagcttaggaagctgtcgcggccgattgcgctgcgttttgtgccccaggttgagcgtagaagaccgcgttcgtaggaggtaaagtgtgggagggaggtgtttcgctttgaatgcgccattttgagtgtggatcgcgtggacgttgatcgggggtgagggtggctttttgtagcttcttggatggcgtaatacgcttttactcggggttcggcggcggtggggcttgggattggtgtgttggttcaccgctcagcttaccgctctcatcagccctatgcaacatcgtcggactccactacattgtgtatctaagcttgcacagacactgttgaaagcaaaatatcaaataatcattgtcaatcgtaattcgcttttgtctatcggtgattccacagcctcactcgaaagaagcatgattgaaatgaaatagccaagccatgagatatcaaagcacgcccatgaatgcagcctgccatacagatctgattcaacgatctgacagtaaatgaaaaattcccagaagcctaaacgtagacgcggacgcagaaatatgctcaaaaaccagaccgaaccgaaagcctgccacgaaaccgagattcaccatatgttaatgcaaggacagtaaggaaagtcaattaggaaaaggcaaagtgagatgcatgagtttgaaaaggggtataataatcgtcaagcagaagatcaagatgagaatggtcaggatatacagaagaaaggagaaaaagataggaggcgtagagtcaggcgcctacggcctgctcgcgtatgttttcgctggacgggctatcaacgattcgctcattgatagatgtagaggagggggagggggagggggagccgtcatgtcttggtgcggaaagatggccgtatattgtggatgaaggagagcaatgagtatgttcggtgtctaggggatctggggtcgggaacgaggtgatcaccggggaagccgggctcccaaagtcctcttccggttgctcttccggttgctcttcatgcgcatccttgaactccgccagatcgtcgctggtacgcccacttaggccagtggcgttgctcgtcctgcgcgccgaatgacgttcggggctgcggtcggtcataatcgactcgccgtccaatatagcaggatccgacgcccgtggctcttcatgaggggtgggcttgcggagcttgaggcgctcctccgggggcatgttttgccattcagacccgaatgtgacgacggatgctttcttgccatgcacggtgaaactaggggctttgcgaggaaggacttctccatcgccggacaattgatcgtcctcctcctgtccaatgctagacactgaaccccgtttcttcttcgaatgagaatggtttctatgagcatgcgaatcacggagggtgcgatgaaggctgcgacggacacgactcggtcgatcgctcttgtcgtgtggatgtgtctcgccctcggtgtctttaccgggaagtgcgtcaggggcgatctcttcattcttatgtgccgacggggacgccggcagctccagaagaccagcttctcttagaacacgctcctcgccgtcatcaaagcccacaggggatgtcagtttcgatgtacgagaagccagactagctccatcccaccggctggcacggctgaggagcgaggcttcacgctcgagtttaatggtcgatggatcgggggagtatgacttggcacgttcgggtacagccacagcagagcgccgacgcccgacacgggcaatgtcagctgaagtggcagatcctgggatactgggacgacgcagttcgtcattcgaaggtttagccagcagtccagcctccgagggctgctcggtttgtgccacatgaggctcggggacatcggcgctagagacgttttgcacaatactaccggctctttccacgctaggctcagatgtcacggacggcccggaaggagaggccaggcgtgctccgtccgactgggattgcgtcggttcagagaccgacccgaccctactttcctctgtctcttcatcctctcctaagtctcgcagaagaacctggcggtaacatttgctacgccagatatcctgtctcacccatttgatcttggcagacaggcggcctgcagccatgatgacgccctcacgggcccgagcgtgaagaggagtgagcacttgcaagtgtcgggcattttgtaaaagatcatccagttgcttttgtgacacggcgagcttttcgtttctttcccggattttttggctcatcaattggcgccgcgcagcaacaaattcggcaacaatgtcagtatcgatgctaggagaagggggctctatgtccgtcgactgttgagacttttgtgaagatatcgagcgtaatcgctgactcttgcggtatcgctgcccctcataattcgtggcgatcatgcccgtggtgcgcacaccagtggtcctgaaggctgccgcatagttgaggtgtgcaagccagtcattcatctcaggctcagagctggcaaggaatatctcctccaacgcgttgtgtcgaacaaagataaaggcatgcttatgctttttataacttgagtctaggagggcaactgtgtcaccagtagacacaatgttgtccggcttgaattcagcaaggggcgggttgaagacaagagtcccttgacggccattcttaacatatgcctcctgctgtgccatgagtgagcgcacccagttcacattgcggaagaagtagagctgagagaaggtgagaatgaccccccattcctgccagggcgacctggcctttttcttctttgggtgtttccgccaaagcaagccgaccttggcgactttgatatctaccagaccgggatttgagtcgcgtgggctatctaagctagccggcatgaacgcgtcaggacgagagcgcagagaaataatctgcaagattccagacttggtgaaggcctggtgaagagcatctatgtcgggtgggccagcggttccaaaatgattgtatgtatcatccagatccatgacatccttcaagctgggccgcagagatcctaatttaccttccaggataagtgagtaggggtcgacaggttcccgtgcaatgcgggccaaattttcggagctagtggttttgaacagagtgcgacgtggtttcgccaagtgtcgatcagggagattggcgtcttcgacgcgaatgaacggagtgtatgagatattctcatagaaacactcaagaatatcgtctgatattccttcactgcgacttatcttgacataatccgccttctgcatcttccgtttgttgttcttattgaagacatccgtgtgaagaatcaaaagcgagaatgcaataaagtatgcgttatccggggatgtgaagatgccaggattacattcgtgatagcgatcagcaaaggcttgcacgaaacgatcaatctgctgtgtttctttcggaagctcgacttccatcaaaagtttgcggattgccatgtcgagtgggtcaccgaagtatgagaaggttctcatatgttttcggagacacaccttgtagaattcctcgtctgattgagcgaggacacccgcaatcatgccccggggcagagtttcttctaaacgtgtcagatatgaagcgggtgtgtcgttttcttcccgttttgggattgctagctcttgctttacgggggtggaggcaccacctatcgtgggcgaaccatgatgaggagaaggtggtgatgagttttgcctcaatcgctgcgtgatattaaagatgtcaccgaaactcttgcggccactggtcgaagtggacgtgcgcgccgaagatgccaaatatggaggtatggacaagtcgtcttggttctcggccagcgatcccatggtagacgaacgtccccggttcttaaaagaggggttagaccgaactgagcgagcggaattcgtcgaatcatttcgaaatagcggtggtacatttgaggaggcaacgaatcccacggtggaacgagctggcgaaggtagtggtgaaacttggtcctggccatctgaaggctcggattttggggtatctgctggggggaactttggtcgaccatccacacctccggccggctgcgagactttggggggtaaaggaaagagaggagtccgggatcgtgtcaagcgtggcatacggaatcgctttgcggtagtgacgggttgaacatcacgaggggaaatgcttggggtgactgtctggtcaccgtagctctggtctgatcgagacgattcggaaaaccggggatcgatcaccgacgagcgctgggagtcgttgggctgtgtggtcccgccccgtgagttggttgacaagcgccctggctcttctgtaatgctctgggacatggcaagcgtcgagtcggtaacctgggagtcggttgatccttgacctcttctacgaggcttcgcaggttgttccattgatttccgagacatttcctccatggactgttttcttgacgacggtcgaaagctgagcttgggtctctgtttcaccggttggtcgagctcgtgactagtcggggcggtagtgataattttaggagctttattcggtagacatagttaatcaattgatcctgatgagcattgagttgtgcatgttttcactcacgaggtagggaagggaccgggggagtttcctcgcccgctttggcgtaagacttggagagctgggggtcagaagcatggcgtagtctcatgaagctgaatcgcttgtggcgtaagttgggacggtcccccgaggatggtcctgcaaagtccgactgagatacctcatgggttgacccgttctcgtccggtacctgcagtcctggatctacttcttctgacaagccgggcgagcgaggaattgactcggatagtctaggttcggcgggggggtagggacgaggaaggtgttcactgcgacgggataggccttgaggatccatggtgctctgcctcttgccatcggccacaagacgcagtcctttccaatgcatggtgaagggcagagcgtgaggacaaacccaagctaataatccatggaatgtaatatgttagatggggaattgaaatagaaacggaggacattgcccaggtggatccagacgcggtggaggtccctcgcaaaaaggggaatgccggaaagggaaacgttctagatttcttgtttctgcccgccacgcgtattttccttttccttttcctttttttggatcttcgcacaaaaatagatagaatcaaaaattagaagaagagagagaaaaaaaatagaggggcaaggcagacgagttagaatctaggcctgagcgtcgggtaattgaccgggtttaagtatagagatggacggcgtagaagatagaaggttgccgttgacgtttattcagggttgttagcttctatttaaatcgtacagatcagatagattaaaggatctttaattagtagtcgaatcattctattcctatggggtatagttggagtacattaggtactaataccaagtcctgctatcactaaaagtgccactgacgtagaacacaaatatcgcgaggcctttcttctttttctccggatgtctatgggccagagaatttcttgctttgcattctattccaactgcttttgatgcattgaacttggactatatctgccatcgttatctcccccaacgctttttccccgccctcttctctcttctccgcatccaggctctcacagatatccctgtgaacctcaggtctgacttgggaccaccaactccccttcctccactggttcttgcgactcggcatgcgtcttttatctcccatattggtcgcgtcgaccttgcttcctcttatctccgctgtccccgctggttcaagcatcaccccaccgccacccctgctgccttcccacctcactcaatccaacccacgcccatgggctcgactccgtgactgggtaattggctcaatatgggatattgatcacaaacggtgcccttcaaaatactcgtcaccaccgtcagatattcacgatcggtatggcagtgatgtcgtcctccgctttcatctgcgccagccagacgaggcagaagcattggctgccgcctcgcaggtgctgttcttggatatttgggcaataacctccaagttcgtagatattagacttgcagatgatatggtgaacttttcttctgaccgatttatgattgtttcgctaattattttgttagatcccttccttgttggacatactacctttaacactccgcacctcctacactcccctcatcgacaacctcgccgacgagatatacgcctcttacccctcccgtcaccgtaccgactcagacttcagttcaggaattgcatcgggtgaactgaagacgatatcgaacggcgacctattcttccaagaataccagccgctctccgtcattacgcagtggatgcgcttgatggcatcgatgttctcctcgcacgtacgtatgactagcgtgggactcagctacgagggtcgcgatattccagcattgcgactcggcgcttctcccgacacagaagccacatcgggccctcgcaaaacaatcgttatcgtcggcggttctcacgccagggaatggatcagtacctccacggtaacatatgtcgcatacagcctcatcactcattacggctattcacccgcggtaacacggctgctacacgagtacgactggatattaatcccaaccctcaatcccgacggatacgtgtattcatgggagtcagaccgtctatggcgtaagaaccgccagccaacggggcttccactgtgccctggcgttgatctagaccgcgcctgggactatgagtgggacggcgagtcgactcgctcgaacccatgttcagaaaactacgccggagcggagcctttcgaagcacttgaatctcaccgcttggcgcagtgggctcagaacgagacggcgcatggccgtgctgagatcgtaggcttcgtcgacttacactcctactcccagcagattctatacccttactcgtactcctgctcatccgtgccccccaccctcgagactctcgaggagctagcgttgggtctagccaaggcaatccgccagacctcccatgaatcatatgacgttacttcagcgtgcgagggaattctcagtcaaggtacggctgctgggattacctcgggtggcagcgcattggattggttctaccataagctgcacgccacgttctcgtaccagatcaaactccgcgaccgtggtagttacggattccttttgccttcggagcacattgttccaacgggcaaggagatattccatgctatgttgacattcggcaagtttctccgaggcgacgaagcgtcggatatcagctttgaggacttgatggcggatcaaatacctataggcgacagcctgtaaggttttttttcttttgatgattgcatgttgactttacgagcggatcttccccttcaacctctgtacttctggtgttgcagagtctttgtacagtatgtaggctatttgagcctaagaatgtaaagaattcgaaacattcctcaatgtaccggtaggcttggatgtgacatgattctaagaaaacaaccactgtatccgaacttccatactaagcaaggtttcaaggatttatgtatcctatcaataagcaggaatcttacgggagcttccaaatgaaaaagaatatatagtttttcgttgctatcctcacagaatatgcgcccagagttacgactaaagtggactagttccagctaagaaaaatcttggcctaaaaaaggtgctcgcggtcataggtcacttttttttactagaggatgctagccctctatattaattcgtacatacatatcaatatactattgatggctacgtttcttgaaccaagggtaaaaggataatagaccgaaaattatctctcataatcaaaatatatgaaggtaaagcaagatattaaaggtctgtcgatgtggaagatgacgggacaaatcgtgctcaagtcccacagcaacaagatatgtgggtaggacgcgcatcagaaaagccaagacacgaatttcttatagaaccagcttgcgtcgttgttcctctctgcctcggcctccttcgcggcgagatacaacgcctcttcgcgatcaatctcgtctttgccagtaaagagatcggctgtcatggggtcaacacctttggagccggtcgcgaacttgtatccgaagatcataatgaggtatagagggataccgaggtaggcggtaatgaagttcttgtaatcgaagtctccatatgttttggggttgtggatgaagacgtcgaagttcttagtgaaagcgatgaggatgcagaatcccagagcaaagtatgagcctgcgatgcccaagggcgccttgtaggccaaactttcctcggggatgccctgggctttgcgtgcacgcacgaagtagatgtgagtgaccaggatggagatccatgtgaggagaccgaagatggtgacaaggttcacgaagtacttgaacacagtcctggagtcgctgctaacgttcatgtagcccagcaaggcaatcacagatgagatagccagtgcaggcacggggacgccacggcggtcggtgcgggcgaagatcttgggggccttgccttcgcgggccaggccatagatcgtacgggtggcgatgtacaaatccgagttggctgctgagaagacaaagagcagaatacaagcgttcaggatgtggggcaggattgggatggcggccagctcgatggcgaccacaaaaggtgaagctgcagctgagccctttgccttgttatcgtctgaaagggcgaagaggaggctcggggagttgtacggaactagtgtgccgacgagaagcacactcgtcacgtagaacaccaggattcggtagaaggtcaatttgatcgcgcgagggatcgtcttgcgggggttttgtgcctctcctaccgtcactccgactagctcagtaccgaggtaggcgaatgtagcggacaccatcgtggaccagaaagccaagaaccgaccaggtgctccatccatcttataggtgttgaaagcacccgggctcttccagtagcggaagcccttacggtcatggtccggtccaccaccaagcatgagaataaaggataggaggatgatgccgaggataacaatgaccttgaatgaggaaagccagaactcaaattcaccgaagaatttcacaccgaaataattgatggcaacgacaattaccaggaagatggtgatccatactccagcgttcacctgctctgtgggtatccagaatgatataaccaatgcaccggcagtcatttgatttggtgatagaatgatatatttgaaccagtatctagattcgggtttcgtgttagcgagattaatttttataggaatgagtagtacatacgtccaaccgagagtgaagccaagcgcagggtcaacaaatcggacagcgtaaccagtgaaaccagagggcaatggcagccaagccgccatctccccaagagcacacatgaccaggaaaacgatgaaaccaacccaagcataagaaatgagaattgcaccgggctattcaagtcagcaagaaggttcgggggtcaatttcggtttcaacactcacgccagccctgtacgacatctggttagccttggatctcagaacaaaatgggtagggaaaacaatcacttactttgcaagagcttcaccggttccgatgatcaagcccgtaccaatagcaccaccgatggctgtttactgtcaacgaatgctcgtgtccgactcagaacgacacccaccaatcatagtaatatgtctcgccttaagcgcacgatgcagctcaacatggttggggtcgttcaggccactttgaccaccttgctcaatcttgatatcctcactgatctcccttgtgagggtattgtccggatattcatcgactttggtagacttctccattgtggattcgacgcgcagaggtttgcgctgacgaggaaaaatgcccgggtaagaggtaagagtaatcccagatgtaagaccaggaagacagggggggaggaggaattaaatggaaagccaagagtagaaagtacacagccctggagaaagataagcaagagtaaaaagcaagttactgcttagttagtgacaggaaacacaaataataagatacgagacccgagaagacctcgggattaagatagccaagggtttttgtggctttacggggtaagatattaatttacccaaacacctcatatcacctgcacagttcattccggtgatctgatagtttggccattttcgggttccggggagtactggcacaatacggctgtgcgcatgacgtagcgctgtgctgttgatctagtatatgtatagattacttcccctgtatcgaatatgtcttccgtcagtaaactccgtatactataccagatattgttccaaaaggaacacccgggcaaagcggagaccttggcgtcaagacgggatactataggctctgcgggggcgcgctttgcggcggcattcgtcggaaatttttaggttgccccattccccccgttcccccgggttttgatatgaagcttcttgtttacacttagtattcaatataagtatgagaataacacatgttcaactgtatttacagagttgatgtcgatccaaaagcaaagagagtaagctccctcgaggccagacccggccatatttttgactcagccacccgattgatagcctcattttacgacaagggcccttatcaagcgcaaacccgaacggactgtacagccatccattgccaaggcggaattccattttcgtccatgaaaactaaactcgacctgggtgagatgcacgttcttgagcctgggcatctgcgccaaggccatttgcgtatggttcagccaatccttatctctcttggccagtgccccgtggcccggtcttaaatttatggcgggattttttggtgaaggtagatgcggaatatttctagaaagattctggattgtggcgggggcctggtggaataatttacccggtggctttggcgtcgaggctgcgcaacacaaagcaaatatgagggggtggggtgccacagcatggagttttctaaccctatctacaaaggatatctcgtacaacatacataatccatagtttcgctggatatgtccatcttcttggcttcttcgattctttgttcggggtatgtgtcaacaaattgtaatactgcttatctcgtgcttgttcctgctgtaacagtggagatgcccagcctagatagcaaatgtttcaatcccgtcacctttttatactttctcatgtaccagtaaatgctcaaatgcgcatcgctctgagacaaggtctgacagaggagagaaacaccaaggctagtatcgaagttggaacggtgttaggaagaaagcctgggacagctccccttgctggatttctggcatcgcaatgtgaacaaatcgaagaatataggaaattggcgagtcatcgttgatggatgtctgaagtccacataagacattctcgctttctggtgtggatttggctgtgacgagcattctcttgatctcacgaggccttgaagatacatggctggtctttcagctcagtgagcaatccaaaggaccaaggttttgggacaaatggtcatagagatggtgtcccaagtctgcaatgtgaggtcccagagatacaggatcttaagtaaaaagccatgacgtggaagtaaaccgtatagggatgtggttgatagcctagacgaagaaagaatacaaaggtattcagattccagaattgaacgaatagtaagagtgtaaaaaatgttgagcggtgtgatacattagctagtataaaatgggaaactgacaatatataatcgagtcggggcctacccagggatccagataatgcgaaagatttcagtaaacagaaaatcgcgcttgctaatattccatccggggtaatcaagcaaatcaagctcaattcaggtaatggtgattgatctagagcatgcatagctgacgtggaagacgatggcccataactagccaacacatccacagcccaatcatgcaatagtcgaggtcacaccgacccaggaaaggaggctctttgtggcaatcgggcaggattcagcctcatgaaaatacccgaagacaggaagctaccggttagatcggttatccattcgtccagaatcaagaatcacagatgtaggttgcaacccacagcgcttcaatgcattactagtgacgtggctttggagaagcggaattttgtttcctcgtaaagaaccacatttgagggggtgtgtggccaatatgcaggtctagcctagttgggttgagggaagaataccacgcacatgtgaaattcagccgctttgttccctagtaggagtgaccttggagcggttggacttgaccgagtggattgctcgtattttttcaactacaacgtaggtggcaccaccgaataatggcgacccctgtggttagacagggtacagttcatgctgtacgatgtgattgaggagaactgagccagtcaatatctcatcatatccgctgttacttcaaaactactgcaagccaccgtttaccaaagtccctgcaaacacgcctgaagctagcagctggggatattctcagcctgtcgatcaaaggcaacgttaccaacagcctgggtgttgggaatgtgatcaagtcattccggtgggggccatttggtctgcaaatctaattccttgaaagtgtgctgtggcgtgcataagtccgttagggcagtggtcgttcattgggtggtgaacgcctcagcggttacagatatttatatttttttatcgtgctgatcggacgattttgattcgtcgaaggaaagtggaatttactatcattagaaatactgaatagtagttaatttgacggttttccatgttaagacttgaagagatgcggggggaattgattccttctcctgagctggtccctatatcagggtctggcagccgagcatctggattcttcaacttccagatcttcaaccaaagaaagttcttaaattccttgtcaatcacatcatgggtgccatgcgtctcccccgcccaatgggcatctatgtccccagttcaccaagaaccctcaccggcgacatgatctctccaccactctctccagaattcagcttcgattccgagactgtcacaccctctctaatcccagctctggaatacatctctgccaaactacaacaaagaatgatgcacgtcaccctcctcatcggccgcggaaagccctacccgaccggtcaagcctccgacttgatgatcatcccaatccattcaatcgagccacaagcatggcgagtacttgaacgcgccattgccaaaggctcgaggaagttctcactcggccctagctggaccgacgccctcagccgcagccagtatgagcgccaggctaacgatcacctcgtcaagcaatccattctgcagaacgaagtcatcttcagtcaggagggcctaactctcctaaacatggaccgcatctataccttcaagcgccgtatgtgcattctctctactcgaccgttctcctgcaacggcggacagtcaatgtcatcctgcgttcggctactccaccgcatcgtcgcagatttcgccggtcgccccttcagcaaggctttcttctaccgcgtctatgagcagctcgatgtcccagacgagcagctcactgccgtcgcagttgcttataaaaacgtccacaaccaagatgcaatcattcttcccgtccaggcaaaagctcctgctcctgcccttactactgcttctactgctcctagtactgctgctgctcttgtttctgttccggttcctgcttctgtttctgctccagttcaggccaaagtcgaggccactattccagcgaaagttacagcgaaggtccagcccaaagtgcaggcagaagttcaagcaaaagctcagctaaaagctgccgagcgagtcatcttgaaacccaagaccgaccctatccctatccgggtaagagccgaacgtccccgtgaagtcaaaagatcgcccatccagactgtgcgcggtcggagacagcctccatcgtcgaggatgcgagggcacaataagcgtggacctaagacgcctctttctgcgtcggatgttactcccatcacgcggaatgagtggaatattcttgtcagccaggatattcgtgtgcagcctaaggttacacagtggactccgtcgccgaatgtcttggccgctgcttgaaccggatttccagttctgttggtgcacagaacaattcgctgttagatccatgataaaccgccagaccgttgggtctcactcacggctcacatgccatcccccaggcgtattggggcttgcttgaggtggaatatagatacatatacgagaaccaaatctagcccatggtgctgggtcatctctgtgtcttccccatacctgattccaccgatactggacctttataggccattttggtggaggacagattggccagtcttgacataccgggcacaaaaacgagttcaggactggcgctgaaaattgctcggtaccctacgatgatatgataatgatttcgaacattttcaaacgcttttaatgacggattggagtcttgaatattgaaaatcaattcacagtgtacggagtatatagttctctttttggaagacatacaaaacttttaatgaaatcgggcaatatcccaaatacatattcaagtagaattatgaccatccaagaatctcaaaaataatcaaatcatacaccttattagatgctgtgatgaatcggcatcctccgggctagtttgtcgagcagccagcatggccccgcttaagctcggcgaccggcgaactgagacagctacccacccaatcacaggcacgggaaaagatttacagtggatgtcaaacaccaaaattcaagtattgaagctattagcacatgggaatgcaagctgtgaataatccaagacatttcctatcggcggaactcgccgctattgtactatagcacacaacactgttggcgttttggatgggattgtagacattcatactgaaatcctgagcactccgggattcgcgcagatcttgcagaatcctacatgtacacatacacgaaggggaggttgtctgaaagatgtcggcttggcggaatcgggcttggcggggttatctaaagtttaagcgcgggcatatagccctggaggaacccctcttcggtgtttccaacgtcaattgaagcttttggatatctctccaagagacattgtagacatcgtgacagaaatttagtctgatatccaccatgtcggaattcaatgagcccgcagatacagactcacgcagtctagacagcgaccgcaaatggagtctgcagcctcttcttcgaagtgccgagcgctcgcatagcaaaatgccgggcattaggaagattcctcttcccgccattggaattattgcatttattgcgttgttgaatatcatagtctggattgcggcagctattgtgctggtaagttcgaataggttgtttgacattggatggatttgctaatgctttctagagttaccatccgtgagtcttcattactggatgtcccatagctcaaatctcatttcatttactaattgagcggaatacagttcgctggtttctacagctgccctagcctattcgcttggattaagacatgcattcgatgcagaccacatatcggtatgtcgaagtcggcctggaaatagaccgaatgattaacagtgagatctataggctatcgatttgatgaccagaagactcctggcaacaggacaaaagcccgttaccgtgggcacgttcttctcgcttggtcactcaacgtgagtacagtcacctcattctatatcaaatcaaacctgacccagtctagcatcgtgattatcacatcagttgtcgtcgcagccacagcagcagctgtctccgaccgcttcgacggcttcagcacggtcggtggaatcattggcacctccgtcagcgctgccttcctgatcctgcttggtcttatgaatgcgtatatcctgtataaactcgtgaagcagatgcaaaaggtcttcggtctccccgagggccatgaagatgaagcgtggaagatcgagggtggtggaatccttttctcggttttgaagaaaatgttcaagctgattgatcggtatgttttttggtcaagctgttgatgctccgcattatctgacaaatgtgtctattttttgtctagtccgtggaagatgtatcccctcgggattcttttcggtcttggcttcgacacctcctccgagatcgctctacttggaatctcatccatcgaagccgcgaagggaacatccttctgggtgattctcattctaccggctttattcacaggtcagtaccctcacatgcaagctcatcaatcccctgcttcagctctaaccaatgtctcccagccggtatgtgtcttctcgacacaattgacggagccttgatgttcgccctctacatccaaccagcgaccaacttcctccctcaaaagccaacaagcactgtctcagacacctcatcaatagctaccgatccagaccagctcccgcaatcacataacaaccaccgcgacccagtcgcattcctgtactactcaatcgtgctaaccacactcactgtcatcgtggcgattgtgattggcgtgatccagctgctcagtctcatcttgaatgttacagacgccaaaggcaaattctgggacggcgtccaggtcgctggtgactactatgatgctattggcggtggtatctgcggttgctttattgtctttggtctgttgagcgttctagtttataaaccatggcgcaggtggatggatcagcgacatgggaaacatgtcgttaatgacatcgagaggtatagagatgacgatgattctccgggggatgctcccggttgtggtatcattgtgactgagaaccccagcggtactgctactgaggtttctgggaagggggcttcgtctcgggttgctattaaggagactggtgagccgagacttgaagaccacatcgtgtaggcgttgctacatcctagctagtataagccagttgctattcttcgaaggcaagtgttttaatatccatatatcctccgtcgtgtagaagtaagcatcttccaatggaaaatgaataccaccaaaagtttaaggtgcacgaggctctgcgggtttaccctagctccttcccttctggtcaaaaatcgtcacccaccctagttcctccttgaccttaagccactggacaggtataaataccccctccccctccccccccnnnnnnnnnnnnnnnnnnnnnnnnnnnnnnnnnnnnnnnnnnnnnnnnnnnnnnnnnnnnnnnnnnnnnnnnnnnnnnnnnnnnnnnnnnnnnnnnnnnnnnnnnnnnnnnnnnnnnnnnnnnnnnnnnnnnnnnnnnnnnnnnnnnnnnnnnnnnnnnnnnnnnnnnnnnnnnnnnnnnnnnnnnnnnnnnnnnnnnnnnnnnnnnnnnnnnnnnnnnnnnnnnnnnnnnnnnnnnnnnnnnnnnnnnnnnnnnnnnnnnnnnnnnnnnnnnnnnnnnnnnnnnnnnnnnncatttctctcttttcttctttcttcctccttcacatctctgggtctgtctctacttccacttttcaaggtttcatcctccaccatggtcaccctccatccacctttccaccttgatccatcatcgaacatgacttgataccactatggaccttccaacttggtcgccttccactaggtcactgtcattgtgatcccatccatcatggaccctcttggtcatccatcaatccaacatgactttgaactatttgcatttcttgtgacatctatctatccattgaaaggcgaaccttgctaactcgtttttagaaacctccccaccccctccccctcacttcattatgaccaagtgaccatccagcaactagaaaccgttccgggcgacaggcttgcagtgaaagcactccggccggtagtttaaatgctacttactgcaagtttccagcaactgggcgtggcctcgcaaagcgactcagtcgacacgcttatggtggaagcactccggccggtagtttaaatgctacccaccataagttgcctcggggcaaaccgacaaccgggcgtggcttcgcaaagcgactcggacggcaacagcttcttgtcagctattataaacacaattcgattatggtcaataacctctttttacccctcatgttccccttcccttcaatcactaccttcttcgatcaccatattctccatcagcccctgcgttaatgctcgtgctcaaacctacaactggcttcatcaatcttcttggtcggactacgtctcgtcggtgtctacctcatattccgtgccaacaaccatcaatgcggcgtctgatcctttctatctcaatgccaatggtaaccaaaatatcgattaccatttcggtcccgaagctacttcaaacaacaagaagcccaggtcaaagcatcattgcttgttccaaatcccagtggctcggtttacaaatgatcattctctccagccaaagaccaaaagccaactgccacatatccactacaggctcggctgatattcaggatgcacataaaattggactcctcgggatttatatatatgcgcagcagggtttgacgtgggggctactaattttcctacattttcgcattcttttgccaggttccaaagtcgttggggtgtgttcgcaaaaaagaaaaacattccatgtctcatacataccaccatagtattcttgttctcacaggacacttcatgtaaagcaaatcaatggaactttcatgatcatctttcaatttcattttaacaacttaatcttccaagtaagtcgagttgcaactactgtcttctatatagtagctttttatttcattatgctacgttcactcttgtatctctggttttttggcgaagcgaagcaattaaatcataacctctcgtgtatgcatgtcacgtgaccaggtggtttgtcctatgggctccaaaatcagtagaaataatgcggtgaagaagtagtctgctgactttggcagaataacctagagaatgaaccatcatatcttccccagagcttctacagtcacactttacgtagtattagaagttagaatcagtcgttttgctctgcaacgactatcgggcggccgtccagatccctcgtaactttataaacttcattgatgcctcaggcgtcacactagtgacgtcaataccatctacataaccccgagctgtcgcaatcccaaattaaggagagccatccctacataattttcctctacaaaattggacgttcgatgttgttgtctcatttgctcgccttgaaaatcaatctttttctaaagcatcaacgccaacaaaagaatgagcacgctccttgaaagactcttccttgcgtatatgatgattgcttattgtagttctatcaaaatttcaatttcttggaactatcagcgagcatgatcgcagataagagctcttcttcaaaagacaagacagaacatgtctccctcttctcaacccaacctcccatcttcattttgccaatgcatctctccctagaggagctggacgagattgaaggccgattgatagattatggcggaagacttacctatgatattgccgaagctggtctcgttctgggaaaagtcgggcgcgtgaagcgtgcagcgctggaactgcgcacccgcggtgtctggacagaggagctcatacccagctcaactccaaaatcaattggcggtggcggcgagccccctctcaagcgcaggcgcacagatcagtacgacggaatcaatgatgtcccggttgagattatcgatctcagtaccgagtctgaaggcgaggatggagctacgaatcaacatgatccatcaaagcagcagatcgcagagaaaaaggcagaagcaattgaaaattcaatcacagtactgaagctcgagtggctggatacctctatcacatccggcagatgtgtttcccaagacccattcgttgtctaccgtgggcgaaagatcccttctcccccaacgacagtgtcagaaaataagcaagacttacttaaacagaaatcaaatcaaataatccagcgtgcaaaggaagatgctggtgtaccaacgccacgagctcctcctccggaccacattcatgcacggcgctcaaaagaaccccctgacagatcttcccagcacccccgaccgacgctataccgaaagacaacctcggaacatgaaatggatgaatctaacgcaccctcacaaccagactgggtccgtgaccaagtcatattcgcatgcctgcgctcagcacccttacaccctccaaacgaagattttatcttgcaactcgtgaaaataagacgtattcgcgaactcaccatcgacaagatcggcgtgcgcgcatatagtaccgccatcgcagcattggcagcatacccatatcccatccaacggccgagcgagatcctcgctttacccgggtgcaacgccaagattgcggacttgttcgcgcagttccaacaacatggtggctgcgagcataccgacgacgacgggaacgttgccgctgccgactcgctggagaaagatcctattctccgggttctgaactctttctttcagatatggggtgttggggctaagacagcacgcgagttttaccagcgtgggtggcgcgacctcgatgatattgtcgagcatgggtgggatacgctctcgcgtgtacagcagattggagtgaaattctacgaggagttccaggaaggtattccccgtgctgagagcgagggtattgctactgtgattcgggatcatgctgctcgggttcgggcggaagatgcaaatggaattgagtgtgtgattgttggcggataccggcgtgggaagcaagttagtggtgatgttgatgttatcttgagtcatcgtgatgatgcggtgactcggaatctgattgttgatcttgttgcgagtcttgaagctgaacgatatatcactcatacgctctcgttgcatttgacttcttcgctgcgcgagcaacagacgttgccttttcatggtgatgatacaaggaaattcgatactttggacaaggcactggttgtctggcaagacccacacttcgatgctacagctgttgaacataatgaccgtcaggtgaaaaatccaaacatccatcgtcgtgtcgatatcattatatcgccttggcgcacggtcggttgcgcgatactcggctggtctggtgatctgacttttcagcgagatctacggcggtatgcgaagaaagcacgcttcttgaagttcgattcgagtggtgtgagagaccgaggtactggaagacaagttgaccttgaagaagatggagagacatgggaggagagggagaaacttgtgatggagggactgggaataggctggagaccaccagaagaacgctgctcgagatagaaaccgatcagatctcaggagaaagagatggacgtaaaaacatacatatattagcgatgtgtacatcgcagactcagatattatttcatgagatacgctaaagtgcccactagtgacgacaatagcgtacaaagctccaaatcacgcaacccgactaagagttgaataccaccagaccagttcccacatccacacacatgctaggaattatggttatcgaatagattggaaacgggggttactgcatctgccatgttcaagtttcgcaagactcagctacaaccacatcaggtaaacaggaaaaaagtgatatgtcacagcctccacgccaatcgtatggccataaggacgacccagaaaaaaggaaaacataaggtacacaagatacaaatctaccgaccttcggtatggatgcataggagcgaagaaaaagaagagcgcaacaaacactgcaaatgcacaatgcataatcgacctacagcgaatcaatcatcacaccataggccttgagctagccatctcaccatagcgtccacgactcctggtagtgtcgtaagcactgagaacacgcatctggccgccatcgtcggcctgggagaaggcgtagccgcgctgcttacgcatgcgctggacctggcggactttccggatggctttttggaactgttccatgcgtggacggtagtcctggacattgtatttctgaatttcctggacatggtggtattgttgtgggtagtacatgcgcttggcgtacttccaggcataatcacgtaggaggcatatacagggtaggacgatagccatcaagtagaagataggggacttgaagaccacgggaatggtgccgtagtattctcgcgagaaacccaaggctggggcggcgtaaccgtatgccgggaggaagatgagccacagggccattgatcctgggatagcaatgaaggtgtacttggtccaaatgttggttatcagagcagctttgccgagaacggtacctagcacggcggtgtaaagagcttcaccccagacccagtggccggcaacctggccatctgccataggaaggtcccagtagaagagcaactgagagacaatgtagaggatgagagagtggaagaatccattcagaatccaggcccaaaagctgtgcttctggaagaatacacctctctgacctagctggtatagctgtgggtagcggtcgagcaatcgggcggagatgaactggtcaaagattcccatcgcgaatggaggcaggacagtgaagaggacgttgtagaaggagagcgtccacgattcgtagataacctctccggagaatgcgttttggaaagaatactgtaacaagtcaggtaccactccaaatgactcctcaagtttggacttacccagaactgagtcatatacagcgtaatgttcttatagtatgagtacagaatgactcgactgatacgagaatagctccacgctccgtgaaccaaaagcaactttcgaaggaacctgaactggccaattgcgacatcagcagatcgtgcggcctgaaggccttcgacaccgctgataccgactccgacatgagcggcttgaatcatggacacatcattggcaccgtcgccaatggccaagaggagagccttcttgtggcgcttgacaagcttgacgaccaaagccttttgaaggggagagacccgactaaagagcatgttagaacaaaaatataatcctccaaaaattcaacggcgcacttaccaacaaacaacggctttgcaaatgacagccaaatccaggaatagcttctccatgtctttctccaatgcaaaagtcaacgaccgcccgtcaattaccaaagctaaaggttcggagtccccagagacaatttgactctgtacggcgtccattttcttttgcaagctgtcacgggtggcttctgacgactcctcgttgatgatgagaagcgtcatgtcttccgaaataagtttgcaagacatgccgatgttgattgcagtctcctgtcggtcaccagtcaagacccaaatcttgatacctgcagtctggagggtgtggatagtatccggaacaccatcctgcaagcgatcctcaatagccgtggcgccaagaagatagaaatccttttcaatcagttcggccgctttgtccagttcatccgcgcggctgccgtcgacagttgtagaagccttgtcatagatctggtaccattgctggaactcgttttctggaacttcccgcatagccagacacaaggtccgtagaccatctgaggcgtactcctccaggtgctggagagttgcttccacggtagggttatcgggatgcagccgctcaataataaccgtgtcagcacccttacagtagacgcggacctttccatctggacaccggaaaatagtggacattcgttttctagtagagttgaactcgcacactgctagcagttcgtattcaagctcctgtccaccagcctcaaagatcaccgatcttggtcttctgttggtgaatcggaaacccagcgaggcggccccatctaccaaggctccctcatccggcgacgctgcttggtacttgatcacatttgggtcatcgctgtttcgctcaggaataacagtgtgacaggtggcaaggagagtgagaaattcgcgaatagcgttctggcttgggtgcgattgaaggttctctctgagtttcttgaaatcataaatcccaacttcagcatcatcctccatggcagcacgtcggtcttcgggaacatcatcgccatattggataccggcaatgctaacttgcttaaactccatcatgttgcaggtaagggtgcctgttttgtcggagaagatgtactcaatctgaccaagctcttcgacaagggaggatgtgcggcatatggccggggtgtcagttttatcgtagtaaatgtcgaggtcggagttgatgaggaaggcttggaagtatttgacgatttcaatggtgacgaagagggaaatcggaaccaaattcgaatagagcacccagtacgtgaaaatgtccataaaaaactgctttaccactttgaccgacccatagtcgaggtatgcaagcgatgaagatctggtcctccgaatagcaagatcaccgacagaactgatgacactcagaacgatgagaatgctaacaagcatcaaaatttgaatgttgactgttcgctccacggctgttcgcttgatcggggttgctgtcgcatttcgcatcagttttgtctcgtggccactaaaaaccacgattccatgaatccagggagtgttgcgcagcgttgcaccacgaagtaggagttgatccggagccaagggtaactctttctcgccacctccagcattcatagtcaaggtggcttcgtaagtatacagactgctatttggctgttccgatcgaacgcgtccgctcagacgactcagatcactggggctgaccagatgcgcagtctccggaatggcttgcttgattttaagattggtctcaccatccaggtttgccgtttcaatgtagcatagaccttcaggctcagatgacgccaatagtaccaagtcggccggaaaaggctgctcggactcaaccctaactatatccccgaccacaacatccacccattttgcatcgtggaacgaagatcccttaagaacttgtgttttcgagtaattcagtcctctgtccgacattctccgtttgtagtcctctaccaattctttgatcgccgacactgccaagacgatggccagcggaacgatagtcgtgaacttatttgtcggcgacacattggggatttgttgcagaacagcggtaaacaagaagaacaagttggcatatttggagaattgctcgaagaggaatttcggaatgaaggtaaagatgttgtacttggccgtcgatacgaagttgttgacgaacctgtgagtggcattggcaggcgggttgttgagctgaatcatgcgcgggcccagtgtcgagggatcaaccttgcgtgcaaagatattaaggtctgacacgtggaacttcttgcgttgcttcgggggtggcgctggagaagcatcgctcccaactgttccccttcttgcgcctgactcggtcaacggaagatccatttccgaatattgcgatgaccccatgccaaacatgtatttcgccttgcccatcaatccacccccgagtccgagaacgctgttgcgctcatttgccttgcggacgtggtgtgaactggcaattcgttcttcgtccgcgtcgagatcataataacccgagtgcccatcgtcgaagtcatccaaagaataccgccgataattgtccagtccagaagtctgggagtaggaccgatctcgcatgccgctggagtaggggtcattggaatggagaccgatgttggcaagcggatgcgccggtctagaaggagcattttgctgcgttgcgccctgctgtgcgctggatccgacaaagttatcataggaaacagaagggcgcggttgtgtttgggtgtacggttcttcagagtcgtcaatgttgtagcgttctaataggtgttcatcattgacgggggggccttgaccactgttatactcaggtccaggatccaacagcaggtcgtcatcgcggccagcggctggatgcgacccaggaggcctaccgctggccatgatgccgcggggaagctgacagcctcactgatctatcgcaataacaatgcccctgaggcattaatcgcaaggtcacgtcgacagaaagcgctctgctatatctgtcggaagcaggatagttggaaatgaagtatggcaaaaaataacagatttgacgggacttggactgaaaaaaatgtgggaattaagtgagaatgaggtccaagggtggcttagcgggcgaaggcaacaattaagctattgttgcgcgggtaggcggtaaagcagttcacaacaatcaaagagaacattcggaatgatactctgattattattcttactagagtgattgtacagtcttacaaacgctttatattttctctgctctctgctgtgtggtcaaaatgcacttctagtcattggccacctccggtctataatgaatggagctaagaataggggactcttggcagccggaaatatattaacagtgtatcgatgtatggaccgacactagtcccactttagagatgaagatctgctgattgagaagaaaagggtaaaagtagctgatttgaacgatttccctcaaatcttaggcgaccagtttatatttacaactgaggaatagtgattcagttcattcatctactagcccgcacccatatgtcgcccatcacgtggcagccaagtattattgatgtaaacgccatgcgaaactccagtcccccagtcatgaaagtaatggtagtacatattgtttattcgatttgaaccagccggtcgttttctgcccgagactcatcagccatgccaatcttcgcccgcttagctaggtcggcttggaggaccttctcaatagcagcattgatctctttgactttctcccatgccacatttgtcttgttcacgatcgccatggcatctgcaggtgcacctgcgtacttcgagaggtagcaaacatcgcctgcgctattcatcccaataacaatatctccctcagccgcctgctcctcctttagggtggcatcaacaatgacatgtttgctatcattgtaggtttggaatgtgaccgagagaggcttgtgtgttatattcagcgggacaggaacacgttgttccacgccgtagactatgacacacccgtctctcaccacagcatccggcctgcggaagtgttgcagcccagccatgaccgcaatgcaggccgcatcggtgatatttccatcgtagtcaataatgtgaacatcggcccgaatcgaccagcagctcacacccttcagaatacacaaggattcagtatcgagggcattagaatggcggatgatacgatcaaggatattggtggcgtatgcttcgatgtcgttggttctgtagagataattgtgagaacaaatcaatatataatgaaaatgcttatgatatataccttccgttttcccaggccggtgagcccattgcactaagctccaggttgatgttgaagagcccatcgaagggtcggtcttcacgcggtttggtaacctcagcggagatgcgaacaataatgctagagaatcagtcagtgatttccatttgtgataaaccaacaaaatatttgaagctcactttgtcttcccaagttgtagcttcacatgtccatattcttcaccaaaggagatatttagaggacgatagtcgtcaggcttgcggccatcgagacgcacattctcacagagtgcttcgagaataaagtcgcgctctgcgattgagagttgcgcttctttcgacatcgttgagggaggtctagcagccccggcgcggggatcaagagttgctttcttttttgggccattttgccaacgcaggccgcattgtagcagaccggattattattatcccgggagttacaccaataatagcggaagttttgtagagcggtgacggggacgtgaggagaatattagtgcctgaggcgactacgtacatcgaaagctggaagccgtcaacggcccagcaattccaactctcacttagcaaccacatcacaaaatgactacaggtatgccattcgaaccaaaattggagtatttggatagtcagagctaatatttatttagcccacagacctacttttgacccggtacggcaacttttcttaacacgactcttcatggacactaactgatctcaacaggctcaaggtaaagaagccctccgtggcccagcctaccaccagagactcctccctgcgcacaaacacctcaaagttcggtatgtatgccgatatttagtcagacaaccccgatcactgacattattctagccaacccggacaaggcggtgcagctgacgccgacccatcgccccgtgaccttcgcgcggagcttctccaggccgaggcggcgcactttgccaaaaagaatggcgttccggtcgaccagccagctattgctgaatcctccgtccctaagcgattgcttgaagctgcgccccaagatggaagcgatggcgatatccaggaagaagacccagaggccaaacgccgacgcatattggaggagacgcgcgacatcgatgccgattcagacgggtcggaagaagacagcagtgacgaggataggtaggtaaacctcaggaccacatgcttaggacgaataaactgacaaatcccagcgacgacgaagatgaggcagccgagttgatgcgggagcttgagaagatcaaaagggaacgattagagcagaaggagaaagaggtatctcgctttctcgcactttgaattcgataacggcggctaatgcataacaggagcgtgagcgcgcggctgaagaagaagagcaacgtgaggttgatatcgcacgcggtaatcctttgctcaattcccaggatttcaacatgaaacggcgctgggatgacgacgttgtgttcaagaaccaggctcggggaacggagaacagagacggcaaggaatttgtcaacgtatgcttacttctatttggcttgttcttatggggtttaactaattcgttttcaggatcttcttcgttctgatttccacaagcgctttatggtatgttcatatgatcgctattattttgatacatttactaaccgggttttcagggcaaatacgtgcggtagagtcttctaggatactagagcatccagatgttagttcaagggtattcagcttagcgaatgggtcttattcttatgttatcttcaaatttgtatcaaaagagcatcataaactgtcaataattgtatccccaaaaatgctcccagcaatctctacaacagtaccgtttcaatatctctgctggatcgagtggagttttgttgtaaatcagcatgtgttctgtatcattcgaatcggtccctaccaacatatgaaatatactatgagtagtagcttaatgtatggagtatggcttgaaagatattggtctccaatatatgcattaacgtgcattggccctgtcgtcagagcttaagttgaagggattgtagtagttgatttcctagaaggacattttaggtacttgactaaaatgcatatagatgacttccagccaattttgttgtattattattcaacatgattgcacaggagctcgaggcctatttagttcaccagaaccccggctggctctctttccccacaaattcttaacatctgagacggccgaagataggaaagtccagtatccacctttctaaaatacccataaggtactcctgatgagctgtacagcagtggagggatacttaactagggtgctttccatagagactagtcaaccatcccagtggaataacgaagtccctcccgctagggaaagtcgagtacatatcgttggcacatgtaggttgcatatttcttcagaatattgctcatgtctatcttctaaatagaaagtttctataacgatcctaagaagaatctgtgacatacgcaactcatttgggtgcatcaccccacgaggggaacaccattggaagagcctctggagtttgatcaggccaattggcctggattaccttcataatttcatcgtagacgatgcggttcccagccggagacagatgcagacctatatgacgagtgagtacaagagaaatgaaagggagggaatatgcatatttcacgcaccatcaatgagcaaactagccaatatctcattgctcggcacatcatgagccccaactagaggttctccctccttccatccagtggtcttcatgaaggcggaccatagatccaccaccgggatattgagcgatgcaccaacctcgcacgcagccgctgcatacgactttgtgaagctcgcagttctgcttgggaacggggtattctttatagcatcgaatccctccagttgatattcattgatgggaggtgggctgatcaaaatgagtcgtgggttctgtgcgcgtgtcgctgggtgttgaatgattgtcttcaagttctctttatattggtccaggggcacatgctggctgtgtgttggaacgcacgcatcgttggcaccgaagaagatagtctatccgatgttaccaattggtatttcgagtacattcgatatttcaaatggggttgctcataaggagggcttaccatgagtcgcacattagctgtttgcggcaaagggaagaacttatcaaagacctttacagcatgggcggttgaatatccactgttacatgttagcatatcccaatgtattatagctttggatgatcttacgctaggccgcggttgacaacatccaatctacgactgtaggctgattatttctttcattagcttattgaccatgcggatctcttgggttgtcagaatattgactcacattcttggagcgcagcatgaaatgcaaaacctagctcttggttgcaggccatttgagtgatggagtctccaaagagaataaattggtcgtatggtttgaatgcattcccatccccatccccctgggtctcgatggtggccatggtgaggcaagaatataaaaataagatcaaattacttgggagtttggaatttaagtcctgggaattgaggattgggggctgataacaacaagaaacggacaggaaaggaagtgggggaagtcactccgcggacaaaaaggaaattggtggaccttcggttgtcaactaaggaatgaatacatgtatatcatcaagactagatcatgagaactacatacatatgtatgtacaataccgattatctaaatctatataaaatctcaaatcaatttatctatccgttcatcgaattgggggtccagatctgaaccccgcactatacgaataggagtataacatagacctttgggttactattatatcaaggtagcttacatgagtataaccagattatttacgtccggcatcacgagtttgagacctctgtacactctaagaatgcccttctcgtcctcctggtccttctaactgtacgaagtagtaatggtgatctgtgtccatcgcgaccccacccaattccagttttccaattactatagttattcaaaggaccatgggtggtcagagaagacacaagaggaagacgaagtcccgtgttagtcccgatataggaaggggccacggcttgaaatggccttgatgaaagttttggaagactcggaatttcagagttcgaacacgaaagtcgaagtttttctgggattgatataagttgaagggccaaggctaaaatatagatgaataggaagaaaaagagtgatcgggttttcccggcgcttaaaagtgacacctaaggttcgagcacatgtaattattccgcggtattcgcataggatgaaagctagcgattctcttgttgaatactggcatggaatttttacatgtctagctcgatggctagttgatttctttctccctgacctacttcgcttactgagcaaatttaccagaactagataatcaagagatctagtaaatgaagatatcgaattgcaccatgaatgtgtggatggatatagaagtgcagagctatgggttatcggaaaaatgaaacacaggagcaagtaatttctcttttacatgacatcgctgtctgatgatgctcaactttgtcccactattcagcatactttttccttaggagagagtagctttgagaccatgaatgtctagttcttcgctgacttcaagcaacacacgtgcatcttcttgtactaaaatagttgtacacaaaatatgtgtagagttatcgtgaccccgacccataaaagaagctttgggactacttgctagtcgccgaaacccccatatgcccgaaagagcggtaaaggggatcgtgctgaaaacggtgctcaaaatgatcttctagctaactacgtaggtatggatctcggagcctatggacgacttgtttataacggatccttcaatgtctatcaacatgtaaagctggaaccactccccgggtgatatgttcgacagtatcgagtttattcatacctcaaagtagactggtcctcaagtcacccccgtgctaaagctgatattcacatctgaagaaagtcagacatccgaaagaggctgacgttgtctaccttaggatgacagagtcacacacccacccctcacacggtggcgcacgcttcataaagcatgccaagagatcagcgttgggtgacgatcggattggacaacgtctggcagaaggattccctcagctgggcggatgctcctagtttagtaacccaaagagatacttccccaatcaactaactagctatagcctatgatacctcgatgctctcgtttatcgtcaatgattcatcagtgtgtggaatgtacattcgcgattcgacgtgatgcagccactctaggcgcagtgaccttgttcatcttgatcagctgggtcaaagtgtccattgcgacaggcatgctctcctgtatatatattgtagggcaggatgtaagtatacctatgtaccccgtgctcgcgacgccactctggacgtgcagcggcaccccgggattcgtttcgggatgttgatcgtaggaaaaaagcagggagatagatcatcaaaccaccagcacaacatgccgagcattgaacattcagtaaaatatattaaagatacgcaaaatgactctagtggctggggggtcactctcacctgacgcgtccccgccgtttcgatggtcacctcatcttaagactcggaccctcttttctcaccgtccatctttttgtgtttttgtgtttttgtgtttttgtgttttgtttttatctttccgaagaatataacttttggaaagagaatatgctacctagtaagtcgagctccttgatttctttgctcgtgtgagttgtttgatgtggatcatctctagatgtcaaaactgactccttgctagccccactgcatataattgaagcataaaggcttctcggcgacatgcctcgctcccttccaaagtccagttttgcctcgcgcgaacaggacgacaccgaaaacgcgcgcgttccccaaacagctcctccctcaccgagtatctacagacgatctcaaagctacctctccgaaacacataccgaataccagtccctcgatgcgccgttcgaggttacagaaacaacgagcctccttgggcccgcccaagccttccgccgacgaggtccgcgacggtcttacaccagcacctccggggtttcgggcaccggtccggactcatttagacacgttctggcggctggtagcctgcggcggacgctaaatcatagccgtgccaactccatgagtagggggttcagccggcgagggagcatggacggcgacagcagacccgctagtcttcctccgtctatgaaggacaatcttactgcctcttcatttctggatgaacggacttggtatgatcaattcacttccacagattgggtgcatgacagtatcgccgatggagcgcggcttcgcctactccgtcagcggaaagatgtgcgaggccgattgctggcggctttcgacggtgcgcaaggatggatcttggtcgcgctcattgggtgcatcacggcctccattgcttacttcgtcgatgtcaccgaaggatcggtctttgatctgaaggaaggcttctgcacgacccggattttccgcaatcgaaggacgtgctgtgaagggctggctgcttgtgatgcgtggcggtcctggtcgaggatcttctcaccatcgggtacagaaagccagtgggttgactttgtcatttttgtcttttgggttgtggcattagctctcatatcgtgtgctttgactctactcacaaagactgttgttccttcttccatttctcttgcgacgcttgatgaaaacctgggcgctgacccccgtggtacaaaatctgggaatggccttggtgcctcggattctcctctttcggagacagagacaagcccactacatggaactttgcctaattatccgtcccgtccagctatgatctactactctgctgctggcagtggagtggcagaagtcaaagtcattaacagtggttttgtccttcatggatatctgggcttgaagacactagtcattaaaaccattggcttgatttttagtgtttcgtctggtttgagcttaggcaaagaaggcccatacgttcatattgctacctgcgtgggcaatatctgttgtcgtctgttcgccaagtataacaaaaacgatggaaagcgacgagaggttctgagtgccagtgccgctagtggtgttgctgttgcctttggtgctccgattggcggcgtcctcttcagcttggaagaagtcagctattatttcccacccaagacccttttccggacgttcttttgttgtattgcagctacgttgtctctcaagttcttaaacccctatggaacaggcaagatcgttttattcgaagttcggtacctttccgactggcaaatcttcgagattttcgttttcatccttctcggtattatggggggcgctgctggtgcgctcttcatcaaagcctcgaatctatgggcacgatcattccgtcgcattccagctatcaagcgctggccaatgcttgaggttttcctcgttgcgttgtttacgggtcttgtcagtttctggaatcggtacaccaggcttgctgtcaccgaacttctatttgagctagcttctccgtgtgaatcagatgtggaaagtacgggcctgtgtcctcgcactgacggcattcttgaaattgtccaggaccttctggtggcgtttgtcatcaagagtttcttgaccattattacgttcggcatcaaagttcctgcgggaatctacgtgccatctatggttgttggtggcttgatggggcgaattgttggacatttgatccagtactgggctcttagacacccgacttttttcttattcgactcttgccctgcagttgctggaattgagtcgtgcgtgactccaggagtctacgcattggttgccgctggagcgaccatgtgcggcgtgacaagactgtcggttacattgcctgtgatcctgttcgaattgacaggaagtctcaaccacgtgcttcctttttcgctgtcggtgctctgcgctaagtggactgcggatgccattgaacctcgcagcatttatgtaagttttgagatccgcctcgtaacttaaatttgacattatactaattgaaaccaggatctcttgaccgacatgaactcctacccattccttgatagcaaactccaaccgaccaccgatgccttgctgggggatatagtccgaccagtgcggaagaatcgcatcatcgatatctctgcatcaccatttttgccagccacagacctccgtttgaaactggaacacctgctcatggcaggcgagctagacagcggacttcctattctacgggacggtgtcctagctggtctgatcccggcaccggatctcgagtacgcactagatacgctgggcgaggaagaagaaaatacgatctgtctgatggccatggatgcttcttcagccgtcttggacagcgataacgaggatgccgacgaggtggatttcagtcaattcattgaccctgtaagtttggttaacttcttcaatatcttggcccatactaatttgtttatacataggctccaatcgctcttgatgttcattcccctatcgatctggtctaccaatgcttcgccaagctaggtcttcgttacctctgcgttactcgggacggaaaatatgccggcctggtacacaagaaagcattcgtgaaattcatgaaggagaatagcgactaggccgtggaaatcggtcgaccactgtactacttctcatttgcattttccggcgttgcctaggcattctacttcaattgtttgtatagccttgcatatcctctcgtttcattccatgtctatcgattatgtctgcctactcaaccaacattggcactgtgcatagttttgttgtatatatctttcttttggacagctaggcatgaagtacaaactttggaacatacttgactagtcatttatcagggaagaccatatcctacccatgtctaaatcaatttttcaaatccaaccatctgaacctcaacatccccgtccttcttccactccaaatcaacaccctctccaacccactcggaaacctccccggggctaacaggccgccacccattcttctcgtgaagcccatccaacgggaagaatgtatcacactcaaacgaagtaggcacatctacagccccctttcgcacaacattcgtcatgacaaccctaacaggccgaccacgtagctcctcggcacccatattcaacgtagcattataaatctcggccccacctataacaaaaatcttgccaagcgtcccctgcgccccatacacagagtccaactgctccaaagctgcgcccagactcggtgtaacaatcgcatccgtcaccgggcccaccggcggagctggaacagcatccttgggcggctcaagagcctccttttccgcacttgtggcctgtgcctgagcggccttagccgcaatctttctcctcatattccctaattcggcagtcacgctctcgcgaacagacccggacgtgtcacgcgtgaccacaacgttaatgcgcttcgcgagtgggcgcagtgaggctggcactgagtcatacgtcttgcggcccatgatgatggcgttcgtcgtgcctggacccggtgggcgggatgttacgcgagcgaagaatgacatgtctgtttttatgcgcggccatgggagcgtgccatttaagccgattcctaggcgcgtgatttcgtcttttgtggttgtcgacgcggtgcggatcggggtcgtcgccacgatcagggtgagggagggaaggggttgcgggttgtgcggtggcattttggtttgcgaggtgatcgtagttgcaattagagaacaaaatattgttattcagagatggggagtgtgatatttgggttgtgagggaggttgttgaatagtggagtggaggctcgcgtcgcgaacagagaaatcgttatcggagttgggccgcttatcgcctcgcagctccaggtacacgatccaatgccaacagggaaacattacactactctattctaactcggtcagcgaagcagcagagtgatagtcaaaaatgtgtttgtattcaacatcacaggaaaaccgaatacgccacaacaccagtcgaacgccagattaaagggaccaagtgggtatcacgcgcgagacagctccaagaaccaacgaccaaaatgcttaaaggagatcctcggaaaattatcgttacttctcggattgttcagagttcttggaattctcagggtcttccgtttcgtggtcctcaggttcatccgacgatggcatcaacaatcctttgtcaagtgcgctctggatggccgtcacatcctcctcgagcttttcacgacgctggacatcccgctcgtcttcgccaagagtatcgagcttaccgaagagccagagctccttcatgagacggtgcaaggcgagcaggtcctccgaggcacggatctgagatagcataatgtcaatttcgtgctctggtgtgaattcagaagctcaactgcatttttcttgggaaggggagaggtggccgggtatgaccggggcggcgcatgtcaacataccagcgcagtggattctacatcaatctggaatgcttctacagcagcatcaacgtgactggtgccgtcgaacttgttggcagcaatggcgacgatattttcgaaccgctgcagcagctgcgagatatcatagtcgacgcgatctgccgcaatacatcgttagcggaaaggtatgggagcatggtatagttgcagtggctcaaatatagtacgcaccaagcaactccttggcagttggacacgaatccatggttggagcgtactttttgttgtcttcggatgatgaaggtaaatccgcgatccatgttgattacgataagaaaaattgtggggctggaagatacgggtagacacgggacgggaacaaaaccgacattatccgaacttaacatcctaacaagccaaggagtaagccatcgtcgctccatatcttgagggccttgctcttcaatgcctcccattcctcgtcttggaattgaagacccatcgaagtgctatgaatagacgtgaaagtgtctgcatatctaggaaagagctttgaggcccaagagcgaagaagagtctttgggcctttcggccctcgaggacatacatagttggtaagatcttcgcggcccttctcacgaaagatagcagctagccgcaattgctccccagctagctcattagagccgttgtagaactcggccagcggccacatcatgcacgggaacaaaatgcggtttgggtccattcccagtctatgactcccacaacatcgaaacaatcattaaccaaatatggtcacccttaccatccagattttgctaagccgtcaggcggtgaagactaataagtcacattgatcacctaggcacttcagataggctatagccatagatgtatgtaactagaaatactgaatatgcttgccaaataactccaacgtattgagtaatgacttgtataggagcccacagtttttacagtataggctgtatcacacgggaaaatgtgatatttagccgtcaagtggtggaatacccgaagcagcaacactagtcttcaagctgatatcctcattcaaatctgatggtggtcatgtactttgcagatcgggaggatgccagcttggtattgaaataagaccgtatgacactggcctgtggcaatagttgtatatcttaattggccatgtacttcgacatctcctacatagtagacttctcttagcacaaacgttgtgctcactttgttatcgtagtgtgcgaatagtaccagcggtgcaagttggaagacattgcactgctagatattgagtaacatatgttatgtagaatacgaaatatgaatagacgttatggaatggtggagtatacagccttggaatgcgcgtatagtagaaggtctagccctggggcctatgatcgtcctttttcctccactttaactctccgctttactctccgcccctaccgtgcgtcaccgcctacacccttcgacaatggttcctctctaaattactcctcacaacaataatcctttcctcctgttgctaggtttgctacctggaaccctttctctccgtgtctgtatcatcctcttgaggcctctatagtcgcaaccttgtgttactttggtctcgatttcgcatcacttcgcttgcaccgacggcccaatcatccgcgactcaacttgtgcctggcacatcatataccatacgtcaccgaatacttcatcgcgtctttctgtggacttgagattgctcgtgaatcgcctcaaacccatcaataatctcgattacgataccaaccatcttgaaacgcgttcccttcatctgtgccaataccatcgtctatcttccctcaactccctgctggatgttctgatcaggtctccagatatttgtccttcgaagacagggtggacggccggtgggccgtctcacagattgaaggcggcaggagatattggagaaaaaggtgtcgaattgaagtaacgccgttcgcgcccctgctcttagggtggactattccaactaccccgcgtcaccttctctgctttattttctttttatcttgagttctcaacactggaaactggactggcgatggacgcgcagtatccctttgcttcccgtgacgacatttggcgtgtttttgacgagttgaaggagctccacattgcccagtacgagcaaggagaacggctcgcgcaactggagcgtcgccgggacgaggatgcccgactgagaagtccttggtgtcctgtctcgccgtttccgcactcggttggggcaatcgctccaggtagtccacctctgcccttcacgatcagctcgccacttaccaagacatcccttccagaccccactttccactcccccccggatgctttcaaaggattcgatcaaggtcatcattccgcaatggccagttctgcgatcggattcgatggcgaagacgagcctagacggggtacgtcacgagccaacagtgtccgttttgacgaaagtgctatccacgggaacggccaggctagccgttccagcaatgaccttcctctgcggaccggcagcggcttgagcacccacccgcttcttgagcggacattttcacaccaatctgatggacgattgagctcctctggccactcacaccattccgctcggactaacagcctgcgcctgaacaccgctcggctgcttggtactacgcctatcgagtcccctctgattccccctcctggactcttcttgcttggaccggtcccgtccatcattcgctgctggttgactgatactttcactaatggctctctcctctatgcagccgtttgctcgggctcttacatctcaagtttgggtctctctatggtccgcgaattcgggttggagaacatgattgtgtgcgagggcgatgtagagtacatcaagctcccgctttatcttcccgaagcacttattcatccatcttcatcacgccccggaacccctactcaccaagttcctgccgtgaccattcgctttgtggtttgcgagacagaagtcggcgataattcgattcaaatcatcattggaagcgatgtgatgcgtgcgcacaatgctgatattttattctcacaagataaactgatcatggtggacgatgaccacaaccgcgtgtctgttcccctcgttcgtcccgagaaggactccgtgtttaagtccctccgcacttctcctaatactggagacatacgggaacctcctactaacggacatccatccgttggtatcattggccggcctgccaatgttcaacagaaacaggcctcagcgcccccatcgactagtctgtctggcagcgagaatagcgatcctcacaagtcccacctacagaacctccaggctcatgctcacatttcagctgaaacgcgctcagctactgtcaatccaccgactcctgagcctactaaaactgaggatatgccatcttggggtggcccatggcgtcgcgatgccaagaaatccgccagcactgcccagaaggtggcggataaacgcgagatgaaggtcttccgcaccggaaaatccacgagccatgcaaactccacaacttcgggctcgggtcctggcagtgctaccactgagcaggccgacaagtcgtctttgccgattgcttctgtccaccacccaaatactccttcggacaagtatggcacgctaaatcccgtgggtggtgcatcggcgtttggatggctcaacccaccccatcataatgcctcctcctagatgaaacagactaggcttggcttttatgtttgattacaaccgaatctgaaatgatctcggcttatggcatgatacgcaagggttgcgattccctggaaatcaggaaaagtgagaggcgctgagttaaaaggctgccaacatagaaggggaaccactttttctttttagcttgtagtattgctggaatgacctactaagtaaaagagaaaaaattgaggaaaaaatgatattcttaccatttaattcgcatgaccaggacaatatcaactgattcgattctattagtatatgtataatcctcctcatctcccatacattcataggtacagggctggacgttagtaaatattagtaatcaatactccagggggctggagtgcaaaatttacgggaggaatttcagcttctgcctggcaagaatacgttttactcgttcgtttaaaatcacagccaaaatcgagatccagaatcaggacgattggccttgagagcaataataatggcaggtctgctggatcttccagctgaattgattctagccatcggtgactacctacaaatgggtacgagacagataccactgccattccatgagcttggagatgcctaccgctacgcaatagagcgtgatccaccacctagctccaaatcccttcattctttcctactcgccacctgtcgcctgaatagtcttctacaaccacttttctatcgtgatatatttgtccgcagatatggtcatgtcggcgcaccatcgccactgcagcagctaaatcggagtcttgaaaaggacccaggtctccaagagcacatcatctcagcgatcattccatgtgacgactctatttatgatatccatcatttcttttggttttccaacatacgagaccttactattcacaagttcagtgattgggagcctttagaatttccaaacaactcacatattggcacttcacctgtggaatgtctaaagctgattgattgtggggcgcatgagggagctctagccgctgtattaagctggccggcatctttgaagacgcttcactacgacgccgagcaaggtgagtgggagggccatattggagacgaaccagccaaaacctggacatgtgctgcttttgtgcgcacgctgcaaccgcaaaaaacaacgttggtagaactgacgatgacacggccaccgcttgtccatgaaggactgggcaatggacctcgcattgatctgagcgagttcatggcccttagaatcctgcgcatttatcatgtcttcctctgtgggtgggatgctccgcatggggtctggaaaggcttacctcacagtctggaggtgttggagatcttttatgacgataccgagctcactgaattcctgagtgagactgataatttggagcacgacaatttcatgctcgatttgatccagcataagagggtgcatcttccatatttacacacagtgaacatctactcgactgaaacagttcctaattctgaaacagaggaggatgtgctcgagggaagctggaggctggcaccatctttgctcgcgcgcgaagcgaaatctgctggtgtaaagctgaaagtatggctgggatacggggataatcaagacttcgagaaaccgacgttttcgagtcactagtcaaaccaaataatgtattcagccaagtggtaaccacttatcacatgcattctttcctagaacatctactatgaaagattagttaagcactgtacgttacttaaaccaggtcccatcaaatcaaatctttgaaaaaacccccaaagcccccttcgtattatccttcgtttccttaacaagcccactaacagcccggaacgcttcgtgcgaagcatcaccaagaatctcaaaaaggacactctcactactcgtaacaacagccccagcatccctcaacctggaaagcgcaatccccctctcctcggtgttcatactgctgacgccatcaacaaggatgtaaacgcggtgaccgcgctcgagaagatcaagcgtcgtctgcgtcacacagatatgagtctcgatcccgacgattatcacgtcaaggggcgcagagccgggggccgggagcagcttctcgatctccggggttatcattgagaagagggttttatctacgtcagctcggacgtgtgtgtcgctgaggtgttgctggagttctggcacggtgttgccgagtttcgcgcggttctgggttgttacgaacacggggattttgagggctgaggctgcgcggagcattttttcagccgttaagaccctgttggttggttggctttttggtttcaattgttcttgggatatgggattcgtacagtttggggaactcgtagattccattgcggaatttttcttggatgtcgcagatgctttggaattgagtcagattttgaagctatatatccttgtttgatactggggttttgcatacaagagtgccggattgcctggtctagtgttaacttgcactgcattaggattcgggggtttcttacggatccgagatgagcgcgcaagggtagccattactgcaacagtttgtggttcctatgtgaggttttagggactcggtaaaatgtaaagaagagaagaattggcggggacgtggggagtcggagaagtcggaaatgcggggaagaagccgagggaagacgagctggtagactatctttgtttcttttaccgtaaatttcaatcgattatggtcatatttggatcggtatatatcgctcgtctactaatctagggatctatagcttcacctcatgcaccttggcccgaccgacaaaccagctgtcatcaccgtttgccgccgctgtgcgaatggcataaagctcgtcgacgaatgccgggacgaagcttcccgggccgcgaacataatctttggccgctgcgttctccgctgcaatctcgtacatgagaatcccagacagcactgcgaggagtctgtcagagcggtgggcaaccaggaaacagccggagattgtgccgatggcacagccggtctgtaaattcatgttagctgtgtactaaaaggatgtgtttggggaggttgcatactccggtcacttgccccaggtatgggtggccattctcgacggcaatgacccgctcgccatcgctgaggtagtccgttgctccggtcaaaagcacaacgttccctatcttaaattagaaaagaggaatcacagctagaaagcctagagagtcacttacgctcccggcgagccaggtcccgagccaaggtggctttttgattgccgtcaagggtactaggtccactgtcgacaccgcgctgttgaacagtactgctaccccaagcttggcgaatttcgccctcgttgcctttgatcagatcaaaataacccccggccataagctgggtcactgcattgcggcgaatgtgtgtcgcagccgcaccgaccgggtcgtagacgactgggttgccccgctcattgtacgccttgatggcttttaagtagtttgagacactctcgctagtcaatgtacccatgttgatcaaaagagcaccatcaaacttgcacaagtcggtggcttcatcgccatatggagacatgatgggagatgcaccactgtagaacggttagcatgaaaaatggctggccaggtacagtatactgacatagaaagggcaacgttggctacgaagtttgacacaacaaaattgatcatgttgtgtacgagaggatgcacctcgaccatcttacggatgatttggggcacctcatccaacaaggcctcgctctcgttagcacgaggaggattgagagcctgtgcaaaccggggagggtttctgatgagcccggcgagtttctcggcggatgctttggggtcatcagctgccacgatcgcactaacaatggctactccatccagtgatttctttggtgactgagactgatagagcactcgttgcacattagagtggttgatgccgccgatagaaaccgtgcctatggcggaagatttaatcgcatctaggatggcttgagtacctgctgttccgatgactgacttggtattggttttgctatgggtggttagcgtctattgatgggtgttggcatattgaaaatgtggacttacgtgggggtggcaaacatagtaccaattccgatatagtcggcgccatctgcggtggcttttatagcctcctcgactgaggacgtactgataccaataatggcattctcgggaagaagcttctttgcttccgcgaagcctatatttgacattaatacatatatttttgtagaattgtagcaacgaactcatgtcatcttgacctagatgcacgccctcggcaccaatggcaagagccacatcgacccggtcattaatcaaaagaggcacattgtacttcttggttatctggtgtagtttccgggcagtttccaccaagagaccagtgtcattggttttgtcccggtattgcaccactgtcacgcctgcagtaggggttagttgaataattggcaggaaggctggagcaccgttcacctccttgcaaagcactttctaccactgtgcataaatctcgtcccttgagaatggccggcgtcgaatccgtgaccaaatagagcgacagatctacgggcatggtgtgttggccttgggccggacaaaagcggggagtttcggggtaatagatccgaagtcgttctgacgaagagaatcaaaccgaaatgaacaacggattgacaagtccagcagaggctgtacaacgcaagacactgtacttaagtcactgaggaagattgccgtttatcgttgtgtggtcatggtggggtcttgcaaggttcggcctgtactcgtccgggtgtagagaacattgtaaaattcactcatagcacctatatatgcttcaatattgccaatggtttgctttcaaagtgaagagactcaaacataaggcaattcttgtcaaaagtcacctcccatgtactactatacccaacgttcagtggccatttatactccgagttatttccggcacgtgcccgctgacataaccgtgatttgtcaaattctgcttttcattttcttcttctactttttcccaacaacacacaaacactgacaggcatcgagagattttcgaagcctttatctatctaccgcgtggacttccagttctacgctattcattattgatcactggttagttcggcctcgccatcatcacttttcaccgtccgccccaaggtctccgacctctgactcggattcccgaaagaacttcgatcgttcccagcaagcaacacgttgagaagtttcccgcgaacttgtctatgtattcgtcctccgtccaaaatttcgaacatcacctgccgctcaagctgcaaacgtttcgcgcgccgaaaccttgcagcatacaccttcgatcctgtggctgaataccccggatctttcctccccaatttgttgtgacttttcctaaagaaatcacattctataatcttcaaaaaagaaacttgacacgcatgtcttgtctcgtcaacaaaattctcatccagaatcctcccagctttccctcaagcaagcccactgtttcattctagtgaaccaaccgctcagttaaaccgtcatcatggccaccgtcaatattcgccgggatatcacggatcccttctatcgctacaagatggaaaagctccaggctaaagtcgagggcaagggcaacggtattaagaccgttgtcgtcaacttgaactcggtcgcccagtctctcagtcggcctcctgcctatctcatcaagtacttcgggtttgaacttggtgcccaggccaacgctaagccctccgacgagcgttggatcatcaacggttctcacgatgcccccaagctccaggactaccttgacggcttcatctccaagtttgtgctatgcaagaagtgcaagaaccctgagaccgacgtctctatcaaggacgacaaaattaccctggactgcaaggcctgtgggcagcggtctgatgttgaccctcgcctcaagctaagcactttcattgttcgcaacaaccctaagggtggcaagaaggagaaaaagaagtcccgccgtgagcgaaacaaggagaaggctgccaatggcgaggatgctagtccaggtgacagcaacaactccgagaatggtgatgatggagattatgctctcgaggccaacagcgatgatgaagtgacccgtcaagctcaggccatcgaggccgaggccgagatcaaggatcacgagtgggccgttgacgtttccgaagaggccgtgaaggctcgtgctaaggagctccccttggacctcaagcgtgcccttgtccttgaggatgtcgacgacgagggagctgatggaccctcgtcctacgagcagttgggcagctggatcgttgaaaccgctgctgagaagggcggtgttaccaacgttagtgatgttgagatctacatgaaggctaaggagttcggcattgagagcaagcacaagactgttgccgttctggcacagagcatcttcgatgagaagattgctaagcagattgaaggtcgcgctggtttgctcaagaagttgatcacctccgatcgccatgagaaggctttcctcggtggtaccgagcgcttcgttggccaggatcatccagagcttgtcgtccagatccctgccatattgctgggctactaccagaatgaccttgtgtctgaggaaaccctcaaggcgtggggtgccaagaccagcaagaagtacgttgatatctcgaccagcaaaaagatccacaaagctgctaagcccttcattgagtggctcgagaatgccgagagtgacgaggagagcgaagaagacagcgagtagacggtccacgctgcgtatgctattctgtacccttggctatttgctttttgcctctattcttaattgaaaatgcagttttgggccttggtctgcccatctggcattaagtgctcggttcgattttcatgttagtttagctcatcaatccccactcctttacaatgaatatctatatggtatcaaccatcatcaattttcatccacactagtcgtacttgagtacttgtacaagttatgtacgaaagcagaaactttttgtcatgcaatgctatcaacgacgaaaagcaataactagaacattatctcagcaagtctgacttgcgactcctctccattgacaaggatattagtagcaccaccacagttactagcattgcctgtagggaccacatccgcccttaggcgatgccgcataaagataaaccacgttaaatccacattccaagtctccatcgcccgaatcgcttcctcgacagaaaccatattttcaccataagtatcattcacagacatagtcgtcctcgaagagaagaaatagtactctggccccacaaacaacgcaatccagccaccaaggatctcgcaaaccctatcacccacttccaacggtaaccggacatgcaaaaggacagtgataaaaagagagaccaacgcgcgccacagacggtggtgcggcgtgaagaatctcgatcccggcgttgagggggagagcgaaagggacgaatatagggctaagtgtagagtggacgccagatctcctgattcagcggcagtcacggtcatggtcgtagcctgggaccgggcacggcgttcgttcgcggccacggcgtcaacgcgcactttatcccatacttggcggtacagccgatcccagcgggagaattcggtttcgacgcgcgtggccataaaatcacccgcgcctttgcacattgcttccatggcctcgcaggctgctaccgtaacgaatgtttcttcttggtggtctgggatttcggggttgcgggttgattctgtggatgaagtggcgatgagggatttggaggtttcatttttttgtgacgaggggaagattattcggcttgctactgtcggccagaggtcgtttattagaggaagaaagctcgtttcgttttgggatagggcgggtaggacatcgataaggattgagaggagggagcgtcgaaggtagggagatggtgaggttaggtgggacgggatagatttgacaatgtggaggaggagggcatgggttttgctaagcggcttctcggcatcttctggctctttggggggtgggagtgacggctcgtccgattcggcttggttcagaagctcttcaatggacggctctggaggaggcttgtcgtatgtttctgaccatggctttttggggtgagggattttgccatcagcatctactaattcgtcctcggcatgccgtttggctttgcggttggcaattttcgcggcgatgattgagattgagagattctcgtatcgagacttgcgggtgtcgtgggagccattctctttgctttcctcgattgtgagcaaagagggtttcttcgccccttcctcgacgactgcagctagtgttttgaacatcacctcaacgagtttgggataaccgtgatatagatccaaaataccaaatatagaatcaaccagatcatccagataaggtatcaacggggcaccgcaaagcttgaccatcataaacaggacttgtggcgggtagggtgacacgtcaaatgtattgagtttcaaggctaccgagttcaccaaatagtccacgttctcaatgatcatcgtactcgtgtctgggtagttgcaggcattggtcaagatatttaggcatgtcatggcgtggcgttgaaggttaggattatgtgatgccagcagctgtaaagttgggtagagcgcatctatgagctcaggtcggaaatcctggccaagttgctgagcttggagagccacggattccaaagccagtgctgatatacgccagtcatctgttccatcgactgacagttcgttcagtatatttaatgagatataatacaactcttcaatcatgccgccacggtcagttgatgagacagacgcctcaacatgctcaagacagatgaaatcgtcaaagctggctgttgctgtagtgctgtcccgcaagaaagtcatcgccaaccagaaaggcgcaataacagaatcacttgatgtcgtgtgcatacggttgacaatcgatcgagtgatctcatttccagactcagacaaattcaatctagtaatcattgactgtagatctttgagagtttgttgctggctttggtgttccaaaatgatgggaggaaatagcttcgatctagcgtcggtgttgagcacctcccagttgaagctatcatccattgaggctaacggctggagagcattggtgtttcgcttgacaacggcaccgaggctatcacataggccggatgccaaaccgctggtaagcaaatctgatccagattgaacttgagataggacctgaaagaccgtggagatctgacgaagcccccactgcttagcaatctcatcgtttccttgcatgattcgagggaaagaagtgagccaggtatgcagagattcttttaaacaatccaatactgtggggtatgttgtggcaagatgagttacgttcttaaaggcttcattcgctccctcgtcctctttatctgccagaacaacaaccgtttcaatcatcataggcagagaatctgaaagtgtggtttggcactcttcaattaccatcagggagaggtctaggacggcagactgaacctctggccgttgatggcggcgaacttggataatactggccagcgcgagcttgatctgcgttgtggtggctttcagccaggcttcatccagagctatcttgtcgcttcgcagctcgggcggggagacttccaaggcgacacggtcgttgagaacagctcttaggagccccgagagaatctgcaaggaagtctggaggagcttgtatgacctgcgagtctgtgttgacggccttagaatcttagccagtgccgacacagtccggggcatgatgctggcaagcacaacgcggtccgtaactcgagcataaagtgcttgcaaagccttagcagctgccagggagatctcatctgatctatcatcgacaattccctctagcaggatatatactgtttggtcgacaaccgtcgccgtgccgatctcgtgataaattgtccgttctgggacaggcccttccaagaccgtaaatatagcaccgaggcagtcgaatccagcaatacacagttcttccggaaccttgggcttcggtagttgcttttcttccgtcttgttcggagatccccccacgatcaacgtcaacaggattatgagttgcttgcccatcgcaggagatagcctctgccgccatccatcggcgaccagtattcgcaaacagtggacagcggactctaagcatcgtgtgggtagtctttgtgtttcattgaagatatgcgacaatggaaagaatgcatattcagcgagcttctcgtcgagcgtattgttccccgcaagttcctttaaacagttgtgtaccggctcaagggctcggagtatgtcggcagcggaagcttgatttcctcggaaacggaggcccacggagctgagttcaatgcatggtgctcgaagctattcagaaatcagcattggtcgtcctaagagccgaagaagcatatcgtacctgcttgaaagattcctgccggaggttttccattgcagccgaacaaggtcggacggcgtcagagttgcaagaaagtaggctaagtgttgagtagtatcaaatcagtagtgcgccatggaacaccgtctagcagagccatcgtgatcgaactgcatccccaagctgcaccgctctgtcatctgccggcataataataaagcggtgagtgtaatctatcccaaacgggcaagatagcactgcacgtgatacgttagcgcgtctcaacgcgtgggaaacccgacagctgcctgcgacacagagtaactagccactgttgccttggctatttccattgcggttcttgtctgctcggggtatttattgagccgtatttcgtgcccatttgacttcgacagaaacttctatgcgggtgttgcgaattcgagagcttgcgctgttatcgctctcacgctcgcgaccaagcttctacatacgatctgcaggacaacacaattccttgaccacatcaattgccaagctatctacggtcttgttatatgccagtagtatagctcaccaaaatcctactttgaagaaaacagcatcctcacaaccgcgaatcatggccgatgacaagagcaggaaacaggctaccctggggtatgtacgggatggccagcaaacgattgggtgcgtcgacaatattcgatggcgcatgcgccctcttaatctgacctattttgactcttattttcattcactcggctaattcgttgtgtttgtcttgtaggaggttcttcggttcgggcgccaaccaaccgccgaaaaagcagaccacattagcttttggcggaaagagacaagcagcaagcagtaatgccgctgatactgagctcacggataacaccaatggatttaaggtggaggacgctagcaattcagcaccaactgcagagccaacgaagggcgtgaagcgggaaaaaagccccgaggcggaagaaagcgatggttctgatattcagcctgtctctaagaggcgacgaaaggcttcgtcgaagagctctcccgctgctaagaaacaatcggcatccccggagaagcctgagtctataaagccaaaagttgaatcgccatcaccaaaaccagcaatgaaaaagctctccgatgttactcctgaagagaagtcaccttcagtagtagaagacgaggacccactggaaagcgaagatgaagatgacctcaagccggagctcacgaggaaatcaatcgaaaagttccaagcaaaaatacaagccagtggtaaagatccatacccagactgggaagcaggcactcctgttccctatgctgcgttatgtaccacattctctctagtagagatgaccaggaagcgtttggaaatcacagaccattgttctcttttccttcgccaggttcttcgcctgacccctgccgatttcctacccactgttcaactgatgattaataaacttgctgccgattatgccggagttgaactgggcatcggggagtcactcatcatgaaagctattggtgaatgtaccggccgcagtcttgccgtcatcaaagccgatcaacgggaaatcggagacctgggactggtcgctgccaaaagtcggtcaaaccagcctaccatgttcaagcccaagcctttgactgttcggggtgtacacgaaggtcttcttggaattgccaaggtccagggtcatggatctcaggacaaaaagatttcaggcatcaagaaactgctgtctgcagccgatgccgacactgctggcaagggaggcaaaggggtggatatcaccaaggacaagggtggtcccagcgaagccaaatttatcgttcgctttttagaaggtaaactgagattgggactcgcagagaagacagttcttgtcgctgtctctcgggcagtccagattcacgaggctgagtcaaccggaaataaaattccttcgacagagcaaatggccgccggtgaaaacatcttcaaaactgtttacagcgagcttcctgcctatgaagtgatcattcctgccgttcttgagcatggtctctttaagttgcctgaagtgtgcaagctttctcccggaattcctatcaagcctatgcttgccaaaccgacaaagtctatcaccgaggtccttgaccgttttgaagggaaggaattcacttgcgaatacaagtacgatggagaaagagcacaaatccattttgtatctccagattctatgcaccagtatcctggagccttggaaacattgcagaaagacagcaaggggctgtcctcaatattttcccgcaactcggaagatctttcaaagaagtatcccgatgttttaggcaagcttggcacttgggtcaaagctgacgttaagagctttgttctggattgcgagactgtcgcatgggataccgaagccaaaaaggttcttccattccagcaactgatgacccgcaagcgcaaggatgtcaaagcggaagatgtcaaggtcaaggtctgcgtgtacgcctttgatctgcttttcttcaatggagaggtaagactattattctatttgatgtctatataagagcgattcgctggatcactcttcctctcttctccttcctcacgattcggtgttctttcgcgtttatggtgaggatgatgagagagaaaggaggcacaccgagtcgctttgggctacatttctagttattctcgctaacttttcgacagccctgcgtcaagaagtctctacgagaaaggcgagagcttatgcatgagtgcttccaaccgattgagggggagttccagtttgcccagtatggcaactctaatgttctcgatgagatccaagaattgctcgaggctagtgttaaggcatcttgtgaaggtcttatggtgaagatgctagacacagcagagagtggctacgagccaagcaagcggagccgcaactggctgaaggtatggtgcctctgtttgttggttatttcaaccgtgctaacttatacaaaggtcaaaaaagattacctcgccggtgttggtgactctcttgatcttgttgtactcggggcctactatggtcgtggaaagcgtacttcggtttacggtgctttccttctcgctgcctacaaccccaacaacgacacatatgagactatctgtaacatcggcactggcttctctgaggtgctacttgaagagctacatcagacgttagttcctctggtaattgaccgcccaaagccattttacactcactcggccgtccccaaggaccaaccggatgtttggtttgagccaagactggtgtgggaagtcaaaactgcggatttgaccctcagcccacgctaccaagccgctgccgatgagttccaaggaacaaccggaggtggaaagggtgtatctctgcgtttcccgcgatatatgaaatcccgcgacgataagaagccagacgaggctactaccacccgtgccgtggcagagatgtatcggaaacaagaagcagtcaccaaggacactactagcaagggaggtgtggatgatgactttgaatattgaaacgatattgtcagacgcactatagcgaatgtagttaaattcatttggtattgatattaaggccttgacaagtcgtacgcattttctagaatggcaccattgcttagatgggtgcatcatcacggggcaatgacaactggttggcaccaatttatcaattcacttttaatccaactattcctttctaagacaaagcccctgctgatcggcatccaatatcatgactttattctacaggtaatcccggctatcagcgggctatcagcggactccgcgatgcttggcgctgcaagccaagcagccggaccctgctcgggccctgagtcgacctgcgcccgcctttctttgtccgcagcacgtcttgccagtgccttggaagtaactgatagcacgaaataacatcatgcatatctttcttggcaccgaggaatgtaacatgcccccctcgacgctccgccatggctactactagctcacaacgcgtgtggagtcgcaacacttatatttcagtgtcggtccggaatgcagcccatctggctctctgcacatttttcttgggctgtgtggttacatacttcattgtcgatatgcgcgtgtttcaattgacgacggccattgggtcgatcatcgtttctgcggcagctcttactcccgagtcagtgctggtctcgcccgattcattcgttgtacctattggttggtagctgattttttttttgtagacagcttatcgcggctccaagacgcggtgaggctattcccaacccatcaggggtaagttgcacaattgtatgtagatatcgacaatgttattgacctaacataggaagttgcactcttttccacctctgaatactccttcgagacccatgctacatcgtcatggtggagtctgctggatctggagactgggaaagtgacacagcttaccaatgacagcaatgtctccgaattgatttggctagggtctactgactcgggtctcttatatatcaacggcacgaacgccgagattcccggaggtaccgagatttgggtgtcagatacctctaatttcgccaactcgtgggtttgtctatgacatgtttgaatgaaacgttaataacttctgtgcagtgcctacaaggcagcttcactgccggcgccgctttctggcctcaagacggccattaccaagtctggagatattaacttcttggtgtatggagagtcctactctaatggcactgcgtacaatgcagagcttgctgccacgcccctaagctcggcgcgtatctacgatagtatttacgtccgccactgggatacctggctcacgacgagattcaatgctatcttctcggggactctgaagaagaaacgagccggacacggagcgacatcccgctacatctctagtggatctctcaagaacctcgtcgcaggagtgaagaatcttgagtcaccctacccaccattcggcgattcatctgactatgacatctccgctaacgggaaattggttgcattcaagagcaaggcgcctgaattgccacgtgcaaacaacactgcttcatatatctatcttgtgccccatgatggatctaaaaaggccgtggctattaacggtccaaacagtcctggtacaccgaacgacatcaagggtgattcgagtagtcctgtcttttccccagatggccgtcacattgcatatctccaaatggaagacatctcctacgagtcggaccgtcgcattgtctacgtttataccattggctccaagaatactattcgtacattggccaggaattgggaccggtctcctggtgcaataaagtggactgctgatggtgaaaacctagttctgaacaccgaggactctgcacgttctcggcttttcttgctgcccgccaatgctggtagtgatttcgagccgaagaacttcaccgacggtggcgcagtggctgcttactatggcctgcctaatggagactatttggtttctagttccgctatctatactagccgcacagtttataccgcgaagcctggcaaaggtatcacgggtgttatcttctccgccaatgaagttgacccggccctgaagagccttggtcaatcagacgttgatgagttctactataggggcaactggacagatgtaagtctaccgttttttcatggaactgaagagatattaacattgtagattcattcctggatcatctatccctcgaactttgacaagtcgaagtcttacccgcttctattctttattcacggtggtcctcaaggttcatggggtgactcctggagcactcggtggaactacaaggtcttcgccgaccaaggatatgtggttgtcgcgcccaatccgactggtagcactggatttggtgataaacttacagatgcgatcgcgaacaattggggtatgccattctcatcactcattttcattctcgccttctaatgatcaacaggcagctacccttacgatgacttggttaaatgttgggagtatgtccgggacaacttcgactttattgataccgaccgcggagtggcagctggcgccagctacggtggcttcatgatcaactggatccagggtaatcccctaggtcgcgagttcaaggcactggctagtcacgatggcacatttgtcgccgacgcaaagatctcgactgaggaattatggtttatggagcatgaggtatgtatcttattcgtggtattttcattgttcttatgctaactcttcaaaagttcaatggcacgttctgggacaaccgagacaactaccgtcgatgggatccatcggctccagagcacattaagcaattcgccaccccacagctcattatccacagtgatttggactatcgacttcccatctctgagggtctggcactgttcaatgtcttgcaggagcgaggtgttccaagccggctgcttagtttccccgatgaaaatcattggtaagtataatggagacctttgggtggatgggatgtatcatcgcagagtcatagaactaattatattgcattcaaatagggtcatcaacaaggaaaatagtctcgtctggcatcaacaggtcttgggatggctcaatcagtactctgggattcgcacccctggcgctgtcagtttgaatgacacagaaatccctgttgtggattataatcctcagttttaggctcgtttgctgcaaacgacggccttctgcatgccatgtctcagatggcttgtttcgtagctatctcttttttcgcagttctatgctgtgtccaacttctatacatgaacaatggaatcatcacaatataacctctttttttcttatgccttgtgttctacctcgtggaatctgccggttactagcagcgaatatagaaaatccccagttgcctacaaacggctctcaccgtagcaaacgaaatacccctcaaaagcatccttctcccacaaaatttcgtcttctttgctatctctgagtttcatcaaaatcctttcctacttatcaaccatcatgcctcccaaaccttccacccgtaagggcgtcaagaagggtatgtcccatgctttgtcccctcatctatcatcatcgcccattagaaataagcaaaaacgcatacactcggctatcctagagagagctaacaaaagctccctgtcagaaatgcctaagacggagccctctactggaacccattccccaagtgagtactggaatcagcttacagaccttcaactggctttcttcgatgatgctacacaattcagggtttctaatccttacgtctttggtacagagatcaaagctgaggtgtcttctcccactcccgcttttttcgccaatgatgggaacgagagtgagtacaattttgacatgactcctgtctcaggcccaatctcgtacctactgccatataccgaggattattttaccttatgtcatgctcccactgccgatgccactggctaccctatctttgtttcccgaaatggccgctgggactggttttatctaacaacaagactacagagtctcccgctatccccgccaatgatacaacgaacttgaatacaaggaacacaaaaagtgagtttctcgataatctcagtcttttcccaaatctatttagatgtactaagggcgacttcaccttgtatccttatcccaagcctggtctcaattccgccaacactcccacgttctcttctcaaaacggatgttgggaatagatctttctcctatctaacacggatacagagtcgtcccctctcagtgtcaaaatggaggatatccccgaggccaatccgaggatccagcgaccgagcaatcccgtctccagcacattctctgacaacctgggccacttgatcttcacacgcggtgtccccgacagcgacgatgatatctcatcggtaccctcgctagttgaaaacatagccgagcaagccaggaccgcgaagcatgtggggttcttcatgaacacttcccacaacaaacacttcatccccattgaagtaccctccctccttggaaacgagaactgggaatactggttggccgccatgctcttactcttccgccaacactcggtgtggcctattgtgactgcggagcttcagccactatcccctagtcacaatctgtacctatggtaccagcgcatgcgcgattgtgcaatcgagctaatatatgccaacgtctccgaggaggttcgcaagactccttgtttcatcagcaccgtgcacgacgatgatccgaatgttttgatgcgccacctgtacgctcactatgcctcacctgattcggatcactctgatgacgagtctgagcttgattagtgtagtgattggtgtttggcaagaattttcgtgttttccactgctccagggttccctgatatctaagcaagggaatattttgcccgtttcatccaaatctttcaatatctgatgtttggtgctattttatttgcaggtacaactttttgtcttaatagattatttagtggttttcctattgctagttcagtgttcttctactacattcataagtgcgaattacacgaaatttggaagcagtacagacattctctcagcaatgacaatagtagtgggcattaccgttcaattcaatggagttctagtagtaagtgtgtatataagaagaacccccaagaaaagctctagggtgtacttgatgatgcttccctttgccttcatatatcgaaatttttttctacgtctgtgtctatctacctttctctaacaagacaaatgattatgaacttacaatatgatatatatttatgggaaaccatagcacgacatcccaaatcccgatctagaacccatttagattcttctgcgctgtaataacatcccccttatccacaaagtccactagcagcacattcggcgcattcccatacaacttagcgcatagtcccgcctgagcaccaatacacccaggcccggttgcagtattagtagtgtctgccttgtggcgagctggaatctttatgccgaaaatatcgacatcaaggaagtggttgacaatgcccatacggcctgtagcagcggtatcagagggtcggtcgatgctgcagtttgagaaaaaggagtctgtgacgtcataggctgtctcgaagtagtaggcgaactcgtcttgaatgaagttcacttttgtagtatcagcaccgtagtctgaaaattgttagtcgaggtatagcctatctctttgtgattggtgctttttacccaggaataccaccaatctctttcctctggatatcatgtcacccagtgtgggccagtctgatattaatagcggatttgcgaagggaacgtaggcgtagttatcaatcccgctgccggagaaagtgtctccaaattcggtgattgctattgagtcgccgttcgtcaagagaagactaacaacttcattcgggtttgtatccagccagttttttatagtcgtcaagaatgatttgagtgttcctgcatcttcgagcaagcatgaggtatggcacagctctatgatgttcccgtcaaggatggagcggtgtgtttgcacttgcagataccggattcccatgtcaagttgggcttttatatcgatgttttggttctgctggggtaagggtccgacaaaggcagagtcgtgggagcctacgaatgtgatattcgagtaggaccgggtgcagtactctgagcggccattacaggttgtcacagctaggtttgacatcgaaggagtggtcgaggagattactgaaggctcagatgctcgcggtactagtattcctggttctgacactgcaagcacaggctgaagtagcaagagagtactcagcattgtacatctcaatttctggtggattttggtcatcgtgttcaaggtcgctttggactatacttgactctgagcgagaaggcgcgctgtttcgccttttattccaagacttctttcttgtcttagcagacaccgtgattcataactactgtccccggtcatgcaggagcaacagctgcccccgcgagatgattatcagctgcccctgcaaaagtggtatgctcatgcctattcctacatacactccacatgccggtccatgaccaaacgagaaccctaaagcaaaaagaaaagaaaccgaaactgactataatcacgtcgatacctccagtgatagagtagcagaacatgaccataaatatcccagtctcctcgtgaccgcagtcatgcaccaataaacggccccagcgtgtgcgccagatatttgatcttagagaattctctgtaaacacaagcgatttgagatatgacaggaaacttgttacattatatctcgctaatacctgctttacaggtaagggtaggttcagacgatagtacgacagacttcagtacacatcgataatcgctgcttggatgggactggcctcattgcataatcgatggaaattagatacctgtaaagataatatcgaggttcatagtcattaacataggccaatgctcgatgatttatatggtgttgcgaagagcaaatatcccacgttatactataactaccccgtcacattcagaattaattaattcatttatagtcttcgacatacctttggcactactgagtctttccttcttctcgtttttattcttaccagtctgacacatttgcttcccgatatcggattcagcgccatcaggctgtgctagatagccacacaacgtttccccttgaacatacaaatggccattggcaaatcgaattaagttatgtgcctttgaagattacatggtattatgctgtttgtctttttgggcccttcatatcgtatcactgtcttaacaccgcttgttgggaatcgccgattgacgtgatgttgtagagaatcagagattatgttcatgcagtactccgcacggagtaccgatcaggttcaattgtaatagaaattatctcatcatgcagatgtacaggaaagctagaatgcactagcacataattagagatgttcaccgtggaaaatattcgaagggcactagacgtacgtcggggtatatcggcaatgctatcgcggtcgcccaaagcatgtgtgatggctcttcgcatcctccgtctgatgccttacaaaatattcatgtgccaaagcctctcagtttggtagggccgaaagatatctggcggacctgcaacgttgcccaggctcttcaagaagcatcgggacatatagacaagcagtatacacagggcgcgatcgcaacaatgccccgcgaacgtgattggggttcattcggacctgggtggggggtgaattttcttgtatctgatatcaaatcagcatcgccttatatgaactttgggccactcggggaccttcagttgttcgaccttcgtttcaatacagctgctggcttttgttggatactccctaaccttccgtcggattccgcgtcgtcatatccatgctggagattgagatggattttggaacgggcggcaacggagtatctatcgagggaccccctcttccagtgggcttcaactcctagtacaacctctagacacgccaaattctaggccagttgagctgttatttttcgggttatattagttagattttgacatattacgatatagggccagtttttgttttcaacgaatttatactcttttcgggaaagcttctgtgtttaagtactttacatactcttcatcagcatgtatgatgtgagataagcacgtgtatatgaaaggctatcaagcttgtgcataccccatatctgcttttcgtatgactataaaacagagaatcaagatagagactatagtaagatgttccatatatcggtcccaagcagtgtgaaaaaaggtgacacttatcaaaagagctaaatagccgtgataaaatacgagggcactcatttgtagctttcatattgagaaactctcgatatcttcaaggttggttcaatgttgcttgcacaaagatgtgtaaccaccttactactcaaatattcttcgacagttcaaggcagaaaattaccagagaatagattaaagatagagagtccatgtgtcagtgtttttttgactatcattgtccgtacaattgtgaaagcatgaaaagtacctggcagccacttgtggctggtgttcggcccctaagacgggcccgacccagacaacggagctctgaactttcattctccactgtgttcatacccccaagctcgacattccactccttctctctatattgtacctcataattcccctcctgttctccgaaataacattctgatcaattccacgatcgttctctcctaacacgctatcactgattcggcctcgtctccacctaggctgcataacggggagcaatggtcattcggagatttcgctcatgagctcgatggctgagggcagtgagggttggtcgcgcgaagacgagcttgacctaggccacgaaggcgatcaccgacaacccgaccatggtgccctcgatcaaacattaccttccccgcaggaaccagtggaagaggaattggacacgatagacgaagcggggaaccacgattccgagaaaatagcgggacataacgatttcccagaaacccctccgccgcgacacgcggactggaccgcgtcagggagcgcggatggaacagggtcaaaccccgacgattccccatcgctacatgttagtggtacaattggcgcataacctggatagctagctgattgacggcagggctctcttcagtcctctctggatagcagtgctctcgcgctccgcggatctccgcgagtcagcccaagcccggctcgtcgcccctttgaccttcgctttcagtcccgattatcttcatcgccgcaaagtttatctagagccggctcgccattcctagcgcatcttcactccagacagtcttcaataaccagccaggtctccccgaccccagaaacagaagccgaaccgctccaggggccttgggatgtggtgcgatggacaaagcttcggaaaatcactgggcaagcgttttctgaaatcgggaagcgcaatttcggacgaccaacttgccttgcagtctccacgtcgattgtaataggtacatccaagggtattattctcgtgtttgactatcagcaaagtctgaagactattattggaacgggcacaccaggtttgtcaaaagacgtgtacacctctggcgcattgtactgatgatttacctagctgttgaatgcggtgctgtcacatcactggcactttccgccgaccactctaccgttgcaggggggcatgactctggcgatatcttcacctgggagatttcgcgctcggcaaagcctttccttcatatcccgccaattccggccaatcaagtcgagactcgaatatccgatggccatctttcaggttctgcagtcattcatatcggctttctcggcaccaggcgaaccgcgctggtctcggctgacacacggggcatgtcgttctcacacctggcaacaagagggatgggtgcagtggggagaacagtcaagacgactcgaattctgggtcgatatcctcaggcaacggcagatatcatgcggcgtaagcctagctctgttcttgctttctctcctctgccactcggcaacgtagagcaatccactgattcgttgggcctcgttgctatgctgacaccctatcttcttgttattgtgtccaccacacccgtggcacaaacccaacacaaagcaccgagaccaaaggaagttcccgctcacagtgccatgaccggcgccttggcatggtttccggcaattcgactgaagggcaaagacacccaaacttcaaacacaaaacttgtctactgctggtcaaatgtgctgaccgtgctcgaagtctcagaagccgagtcagacgaacctgcaaacaaggacaaaccccccagtcttgtcttcagagcgcgcagcagatggagagcagatgaagccattgtggctgttcagtggctcagtcgctcggtactcgcagtcttcacaataacgcagcggctgctaattatcgaggattattccatgcatgtgaccgactcggtcgatctcgccaacagacatatatatcacaccgatctcttctcgtcgcaactccattcactggttgaacagtttgacgaagaggacgagtcgatgcacggagtggtagcagatgcattccatatgagttttcgttcttataaagggcgcttgttcttgcttggttataatgaagccttggtgggcaatctctcaaattgggccgatcgcttgctggcgcttatggaggctggtgacttcattggggccattcgactagcaacctcgtactatacgggagagtcagaaaagctgacggttgggcttcctgaagaggatgttttgagacagcccattgtgcaagaaaggcttttggaaatgatttccgcctccctcaagtatgcttttggtcgaaattacgaagcaagcaacggccgactggagaaccagcagctagaggagctagccgatgtttctatcgcggcttgtatctacatggctgacgaagagttcctctgggaagaagtcttcaactggtatgaggagcaagattcggcgggcattttcctggatgcactcgaaccgcgtatcattgatgggactctgcgatcactacccccgaccgcggtcaaggccttgatcaaccatttcattggaactcactcgaccggtcgattggaggagatcatctgccttcttgacacgactacgatggacatcgatcaagtcacaacgctgtgtaagcagcacaatctttacgacgcctttatatatgtatggaaccgctgtctaatggattatgtgggtcccctagaagagctactacatctgattccctcacaatccgagcccttggccaacggcgactatgtgattgaaatgagacggcagaacaatgcgatgaaaatgttcccctatttgtcatttatcttaacgggtcgcatctatcccaccggtgaggacatggatgaggctgaagccatgcgagccaaaacagatttgtaccaattcctcttctcgggtcgtgcgtccggtacggtacctagagacaccagcggggcagactccttctctcaacttcgagccatgctcaagtttgacgcttccagcttcatgagcatgctcaatgaagcattcgaggatagcttcctaaatgagcccgagagcgaggatgtctccgcgtccggcatgttaatcaatcgacagtacctcatcagcattttgctccaagtcatgaccgccgattttttcacgccttttgataccatataccttgatatgtttgttgcgcgcaatctgccaaaatatccacagtatattctcctttctggcacaactctccaccaggttctggtccgtgtatgccaatatcccgatcaggaaatggcagacgattgcgaattgagtgcagaatatctgctgtctttttaccacccaccggacatccagagcatgattcctctattcaaggaggcacgattcttccggattctcaagtcggtctaccgtctagagaagcaatatcctctgttggtcatgacttacctagaggatccaagtgatcgcgatgctatcttcacttgtctgcatgactgcctccgtccaggctctgggcttggaaaaaaacagagacgcggtatcgtggatgtggtcaaggagcatgcccgggagatcgcttcgattgacgtgacgcacgctgcacagacgatgcaagacctggcccctgaaacacactctacgtttttgcgggttttgcaagatgatccccagcaacagtaccagtacttgctggtgctcatcgagccgcaggctcagaccgcggacacccaatcttcgcccaatattgagaactggatgatcgagcgatatgtgcagctcttgtgcaaatataacccctctcatgtggcggacttcgtcgacggattgcgagtcggtgacatccgcttagatgaactactcccgtttattgaggaaagcggagctatcgatgctgccgtcattctcctcgcccgacagggtcaagtccgcgaggcccttgaccgtcttgtcgcacacctgaacaccctcgaatccggtctggtaggcatcctccagagcgtgcgcgagagccccgactcagcgactaccgccgaggcaatcgacgacctcatggagtctctgaacaagtatgcaggtgtcggaacgtggctctgtcagggccaaagtaagacagtcaagcagtcgcgcacaagcagcgccaacggcaaacgcaacgcgccaactctcgatcaacctctaacgtttgaagaactcctttggctcgaccacattgaagccgttgtgcgcatcgcaagcaacgtcttcgccttcatacaaggaaacaacccccaaatagcccttcccacccaaccaaccacatccctcaccggcgaaagcggccgcctaacaacctcattccgcaccctcgtccagcaagtcttcacagctctcctagcaagcacagtaaaaagcagcccagccacaaccgaaagaacagacatgtccttcttacgcatcctgcgcgcattcctgagtcgcgccgcaacctggtcgccctcactcctcgagctgcgcgccgtgctagcatccatcttttccgcctactcttacgagaaatccctgctgaccctcgcaaacggcatgttggaccgcgacctcttcgtccacgtcgacgaagtcacccgtctacgccagcacggctggcggccccgtggccacacctgcgagctctgccgccgtcgcatctggggcccgagtgttggtgacgcgcattggtccgcatgggaagcgcgacgcgccgatgcctattcccaccgcatcgcgagacgcaatgaggatagctatgacccgtccgagcgcgggaagggcaaggctgctgatgtcggagtcggccatccgtcccgtctggatgcggggcgtgcgcatgcgcatactcatagcgctcgcgctggtggtatctccgatgcgaatgctgaccatgatcgtgaccatgaccacgaccacgccgaggatggagctggatctagcaccgtgactacagtcatagccagtaccccagaacccattgtgattttcgcctgtcgacacctctaccaccgacgctgcgtgctggacgccgtcagcgcgggggcccgacccgctgaaaccgcgtttcggcgcgaccatttgcccgactggtcaggggccgagctgttctgcccagcctgtacatagttttcgggggacaccgggaatgattatttcctttgtgtctaggggtattcttttgttactttttttttctatctctttgtttttgcctactttagatgctgttcggggaatatccctagatgaggatcatcttgtcttgcatatagccattctccttctttttatcccccactctttgtaactcccaactgaccgtaatataatgtgctattaaagccaggtctatccctgtcatagtcatccgtgctagtcttgtctgtcttccgtcggaacaggtgatacgaatggtgatgttctttgcttcagctgttcagctcatttcccacatgcgctcagctgtactctcaatgtgatcgaataaaaatttctactctgattattgttcggtcccgctgcaggggttcgcgggaacactgatatggcacggcttttcttccaggtggattctatgattgtgttattttgatccagagggtccaatgctctttgcttttggtagtgatctacaatagatggtgtatagggccgggatgaatcttggaatgacactgtcattttactgctgtgtttgatatcagttttgggtaggatctccgtgagcactgatcatgtaccgggggatacatgaaaatatgtacttccactggtatatctgtatgtgttggtacttgtgtctaagtacctcaaaatggccagagagacctggtgatgttcacgaattccacctgagtccgccacttcatttttaattcctcagattctcgatctgactcttcacttgctgaagaattgcctgacaaaaattcccggtaacaaagaaagaaaagcccaaaaaggcttgatggccgagagtcttcaaacagctgttgacctatcatcttccttctcttccctttactactacatatgcaaaccttagatgttggcggtactcactctgattggtcgtggatagttacattactggtttgatctatatgtctctcctttctttctccaaatccgaaacatttaaggttggtgtttagcgcttgagatatccatggatccgatacggttgaaggtgaatacactactatattgtgtacccgtgaacattgtacgttgttgcttgctatcctaccctgaatgtcaatctgagcacattacagaatagaccggttcaatcggcaagatcgaaatgatctactgacagcattgatacagggctcggaggtgtcagactgattagatgtttcaacatgccccctttaaccgcatatcttcgattagagtgtctggtggatgtatcacgctgctccattcttttttctgtttttcttttttcttttttcctgtttaccattttcttcctggggagagtggaggcgtctgaagtataaaggtggtccctctccctgtataaagcatcgatcaatctgtagtccattgtgcatgttattgtgcctaggcctattgtccctctctattgtgattttgtattcattcctttccttctattgtttcttgccattgtgatcagtatctgggatactagatctttcccagtctttgacagactctctctttccaatccctctttctcctcacaaacatcctacaaaccccctatcatttaagcataatgcagctattctcagcccttctgcccactgtgggcttgttagcgcaggtatcttccgctgcatacaccctacgcgatgactatggtaccaccgactcgttttttgacaagttcaacttctacacggtatgtctatcagcattggtcccgactttttgcctcataataaactcatcttatatataggacactgaccccactaatggttttgtgagctatgtcgaccggaacaccgcatcgggcaatggtctcctcgacacgagcaacggcatctacatcggcgttgaccactccaacaccgccagtacgcctggccgccagagcgtccgcctggaaagtaccactacctacaaacatggtcttgttattctcgatctggcacatatgcctagcagcacatgtggcacctggcccgccttgtgagaaccccagccgcaatccctttttattaatcagacaaggaaataagaaaaagaaaatcgctaacaccctccagctggatgctcggttctaactggcccaataacggcgaaatcgacataatcgaaggcgtaaatgagcaaacccaaaatcaaatggccctgcacaccagcgacggctgcactatcaacaacggcggcttcacaggaaccctcgacacagcgaactgttacgtccaagccagcggccaatcctcaaatagtggctgctcaatccaaagcgacagcacccagtcctacggcacaggcttcaacaacgttggaggcggcgtctacgccaccgaatggaccggctccgccatatcagtctggttcttcccctccaacgccgtgccggctgatatttcatcgggaactccaaacccggcgggctggggcacgcccacagcactcttttccggtggctgcgacatcgactcgcatttcaacgatctgcagatcgtgttcgatattaccttctgtggagactgggcgggctcggtttggggttcgtcgagttgtgccagttatgccgcatcgtgtgtcgacttcgtacagaataatcccacggctttccaggagacatactggagtgtgcggtcgcttaaggtatatcaggacttgactagctccacgagtggtgctgagggtgacgatgaggaggtggatgctgattggaattctacggcgtcgtacgagcgctctgtgcctaggagttctatgaggcatcgccggcagcccaatcatcataggcatggccatgcttagatgctgatgctgatggatggattgttttctgcgttgaaagtgatatgggttcgatctgttttgcatttcgatagtgatcttcgattgtaaatatcccctttttttcagcctgtttcttgattttcgttcatcttacggtctctttactcgtccgggctccgatggtctgtgctggtccacagctgtgggaggacgagcacatttgataggctttattctttattctttatgatgactttatgaatatctcttccatcttgatgatggaatgaaaatgggcaataacaatcatgagcatggttatgctctgtatatatttcttctgagctgtaagtgctgagcagactacgattgatatacaagacaagaatatatacttgaatatatgtaccaactaatagtcatattaacattaagattaacctcacgccccaaacccaagaacatcgcgttgatcatccgtaagccgaccccactccaaaagcaaccggaagaagtagatctccatatcctccttcctcaacgccgtattcgcccacttccgcccttcctccgcaatccacttcccctgctgatcatgcgccttcatgcgcatcttcaggggcgcattaggatcactctcctcggatgcggcagcaggcacgcccgcaaagtatgcaagcgtactccacaggccatggagacggatatcgacaggcacaaagtgcatccatgaggttatacgggagtcgaaccactggcggaacaggcccgttttaaggggcaggctgtggctgtgtaggaaggggaggaagcggccgctgaagcctgcgccatcgaggtcgaagaggaagcggtgcgaccagtgtgcttggaagtctgcccagcctgcggtgcccagctctgcagcttgttcgtcgcagtcgccgcagcggacgattgggtcggcgaggtggacagcggtttggagatgtagctctgcagccggggcgctgccgtccattgtctcgtattggaaggagttctcatttgagtctgctgggaggaggacggagacttggttgttggtgttattgttgattagatgggcgaagcgctggcgtggcatgcctttccattcaccgaagcggctgacgccttctgatgtactgccgagccagtatagagagttctctttctggccatagtccagatccgggtattcgtctgtcggttgatatttcaccttgtcgatgtagttccatgggcttgggaagaggatgtcgttgaacccggtgagagcactttggctgaataccggaatgagttcctgagacaccttgaaggaggccggggagattaggagaccatggaggaaggcaaggtcaggttggtggcagatttcggaggcgaggttgaaatctagggggaattgacccatggaatggggagccacgcatgagagacatatatcacgacggttccagattcgctgagagcgcaccttcgatgacggcgggcagacagcgctcacataagggtcgaaaacacccctccacgctccgtcagtgaatacggtaatgttggtttgatcggccggttcaatcgggtcccagccctcctctcggttgttcgaccatgtctgcaccatgcgctctttggggatcattgcttgcatcccagtctgccggttcagcatcgatattttctcccagggaactgcaacacggggttcatcgttcagattgaataccaagtccatatccgggagatatttggtaaaattcttcatcatgtccgcggcacccgccaccatccacgcatgggtcggttttatgccttcttgcaccatggccgtgccgttgcgaattctgatcccaccgagatcgttgaaagggtttgtggctagctcgtgtgtcattgcacggatgtgctccggagccagggctcgaaagggaagtagatcatggtatatctgatcgaaatcatcgatgataactgacgattgggcagtggcatattgataccattcaccaaagcccctagacaaagattagttgagttgtgcacatgggtattcaaaacttacggtggtggatgctgattatatcgcctctggtattcggtgacagcgtcgccaagagtcttgcttctagacgcctgagcgagatagttgtgatgatgaattccaccatcctttatgaggaactcaatcgggtgtatattatcaaggcgatgctttctcactgcaaaaacgagactgatcccacatagcacggcaaacaatatttgtatggcaacgttggtgcgatataatttcggctcttcgtcatgaaccactcgcgtaagaagaaacaagagggtacctgttaaagatgccgccaacgggagaacagcatgagttagagagataaatgggaagggtgattgtccagtgagagccgataaagaggaaaagtatacgatcatgaaaccgcctataattgacaccccaaggatgtcgaaatgcggcaactaaagaaatcagtattggcagagatgagtatagataattgggaggaccaacaatatgccaggcagacaataccagtattacaaccaacacagactggctgaaagcgccgcgcgaatactctagatccaacattggttgacctgcaagttcaggcgagctatccggtacccagatggatataatactccagaccaaagaaagaccctagaaagatcatcagaaaaaatactccccacacgatcgtactcgtctgcttaccaagagaccagctccaaggaacgttaaagttcgttttctgcgcgcatcatcaaattgagtgccaatccgacatagctcggtaataccgataagtataacagaatcagcaaagaggttgaacagcctatatgatcgtaggtgcgatgcgccatttgatacaataggacagatataggttgaccgggttccagccgagaacgatgaagccaagagcccaccagtcgacaagaatgcggctgcaattaagcctctgaagcggctttgcgtgagataatagaagctccggcgtgaaatggagtatatcacctgtagcggcggcttgtcgaatcgctgggtggggacatatctgtccacttgtcgcgatcgatggttgcgccagtagtcatagagcgaaataacgaaaggaatagtgtactattcatgacgccgtattagtcgcatgagaaattgaatgataaacaatgtattcagccacttacagcgtatccagcaggcgcgcattcagtgtttcgagttacttggcggaaagactcgattcgcaagccacacaaccccaataagagaccgagctttatccaccacgattggacccgtagccgagggcgagtctcgacatcacccagtacaaaagatgaggttgagacgcgggaaggaagctcaaattgttccgcgagagggataacaggccgtttacttgtcggcgaggatggcgccgaccccaatgagatgaaccgactccataccaaaatagtggcccccgtaaggaaacacaccagaactgatgtactaatggggcgatctataccggcgcaacagtcagatcaagttgtaagacattgatatccacggcgacgactcaccaaaagcgtatgtggtattataggaggtaataaggaatagcgagcttaaaagaaatatgctgcccatataatgcgatcatgagcctaagtctccaacaatgtgagatagcttgctagatactcaccccacacagaccttcaacccgaggtcggaagataactggatcatattgcgccaatcagtttatgatcgttctaaagcgtcccaggccatttctgtgagtccaagaattaattgaacagttgagaggtgacaagacaaagacacctcctgtagatcttcaggagattgacagtgttcgaaacatggaaagaaaaagcagggtaaggagggccaagagggccctttgatccactggcggctaatcagaggcaatccggagtgctgatccattagggttgcgtcaacggacgggttatgatgtatttcacggttggaccttttactgcgcatgtaacgatgggccctgccttgcattgcttgtattctaataaggtatcttgccaatgagtggtggaacatctccagccactatgctcaaatctgttagctcctggtggttagctggtttttacccggagatacattgtattgcaaaagcaggtcagcaagaaatgccgagccattcagcggccagaatcaagccttggtcaacttcacgacccacttgagtcctgagcgtcatgtcgcttgtgcgaccttccaatgcataagctgttgtacttcgtacatcatgttcggctttctaggcagatcctgcaagcagctgtcctatacatcgatgtacttgacgaaggtacacacagccaaggactagaacacgcgtcatattagccaagaacctgtttgttgtaccctgtcggctccattcgcatgtggtgaaataaagatggcccaggcgacccatggttagcgccaaaagagcactcaattaaatttgactaagctcaaagcagttcgtggatttcctagctggatactccacgtcatccatagccacgtgatctgataagggtccaggcggtccactgtctatccaatgaaatgtaaccgcggctagtccgtttcgagcattcgacctcaacatagagtatcccacgtgacttcccaaccccgcaagaccaatcatatgtacatactaaaggccatccgtataacctcttataagggaccttagaaaaatggctttcttattaagcgtctttgttgtatattctcattgactacaacatatgttgtatatgcccgaaaggacgcagggctggtctgcagagctcatcagatatataccgcctacttctttggggtgaccctggcaaatcacagccacgtgacaggatatacttatataatcaagatggaggcggtgtatacctcgggcggtatcagagagcagtatcatttttttagccgctgggaagttttttttggtcgcaagacgaagctaggtgttttttccaatcaacactactcctgaatcgccatgccccgcaaggcgattgactcgcggattcccgctcttattcggaatggtgtgcaggagaagaagcgcagcttcttcgtggttgttggcgaccatgccaaagatgtgatcgtgcatcttcactatatcatgtccagcgtggacgtgaagcagaacaaatcagtactttgggcgtacaagaaagaccttcttggctttacgagtcaccggaagaagcgcgaaatgaagattaagaaggaggtcaagcgtggcattcgcgaaccgaaccaagaagacccattcgaacttttcatcaccctcaaccagatccgctatgtatactacaaggaaaccgagaagattttgggtaacacctatggcatgtgtgtgttacaggacttcgaggccatgactcccaatttgcttgcacgaaccgtcgagaccgtcgagggtggaggtttggtcatcctgcttttgaagagcatgaccagtttgaagcaactttataccatgtccatggatattcactcgcgataccgaacagaagcacacgatgatgttgtagctcgattcaacgagcgattcatcctgtccctcggaagctgcgattcgtgtctggtggtcgacgacgagttgaacgtgttgcccatctccggcggcaagaccgtgaagcccctcccggcccccgaaacaacggacgagtcagcttttggcacgaagaaggaattgaaggaaatcaaggagagcttggcagactcgaagcccgtgggccctctgctcaacttggctcgcaccgtggatcaagcgaaggcgcttctgacctttgttgatgcaatcgctgaaaagacgctgaagagcactgttacactgactgccggtcgtggacgaggaaagtccgccgctctcggtgtcgccatcgccgcggctgtcgctcacggctacagcaacatcttcatcacttctcccagtccagagaacttgaagacactcttcgagttcattttcaagggctttgatgcacttggatatctcgaccatgttgactacaccatcttgcagtcgacaaatcccgacttcaacaaggctgtcgtgcgcgtgaacattcaccgcaatcaccgtcaaaccatccagtacatccagcctcaggatgcgcaagtcttaggacaggcagagcttctcgttatcgatgaggctgcagctatccctctaccattggtgcgcaagctgatggggccttacctggtgttcatgtcctccactattaatggatacgaaggtacgggccggtccctatctctgaagttgattcagcaactgcgggaacaatctcgaagtggagtcaagacagacgacaccgacgtcgccgaccgcagcacaggcaagtcagccaagggtgccgacaagaacctgagcggccgaaccttgagagaaatcactcttacagagcccattcgatatgccccaggtgattctgtcgagaaatggctgaataaggtcctctgccttgacgcaactcttcccaagtcgcacatgaacacacaaggctgccctcacccctcgcagtgccagctgcttcaggtcaaccgtgataccctattctccttccaccctgtctccgagaagttcttgcagcagatgatggcgctctatgttgccagtcattacaagaacacacctaacgaccttcagcttatgagtgacgcacccgctcatcaactctatgtgctcgtcccgcctattgatgagggggccaccaagcttcccgagccactttgcgtcattcaggtcgctctcgagggtcgcatcagtcgccaaagtgttctcaacagtttgagccgtggccagcgtgcaggaggtgatctcattccctggttggtcagccagcagttccaggatgagaacttcgccagtctctcgggtgctcgtgttgtccgtatagcgactaaccccgagtatgtgggtatgggatacggttcccgagctatggagcttctggtcgacttcttcgagggcaagttcaccaatttggaggaggaggccactaccgccgaagagcaaatggtccgtgttacggacgaagagctcgccggttctagcctcttggatgacaacgtccatgtccgagacattcgctccatgcccccgctattcggcaagctgaccgaacgtcgccctgatgtccttgactacattggtgtcagctacggtcttaccccatccctccacaagttctggaagcgcggttcttttgtcccggtgtatcttcgtcagacccccaacgatctcacaggagagcactcttgcgtgatggttcgcaccctctccactggcgagactgacgacgcctggttgagcgcctacgcgcgcgacttccacaagcgattcctctctctgatgtcctaccaattcgggcagttcccgtctgtcctctccctcagcatctgcgagtctgccaactccggtgccaagaaggacccgaagtttaagccgcgcgtgctacagaaatccgacctcgatgccgctttctcgccctttgatctcaagcgtctggatagctacgccaacaacctcttagactaccacgtcatcctggacctggtccctactctctccgactactactttggaaaccgtctcgatggcaaggtcagcctctccggcgtgcagcaatccattctcctcgccatcggtttgcagcacaagaacctcgacgaccttgagaaggagctgaacctcccctcctcccagctccttgctatgttcctcaagattgtccgcaagatttccacccacttccgcaatctcatcgagaacgatatcgagcaatctctgcccgcacagaaggttcgtatcgagacctctgccgctcacgacgatgagcccgaagtcaaccttcagcctctgcccatcagtctggaggatgagcttcttgaaggaggtaaacagatcgataaggagatgctcgccaaacagcgcgctctgagcgcatctaatccgtaagttttaatcgctttgtctgcctatcgaaacaacaataactgatttccagcccacagtgatggacctgacagttccaagtcctctaagcgcaagaaggtcgagactgcgcgcgatatatacgacaaggagattgactcgaagagacaaaagatgatcaagaagggcaccgagggccgcaaaaagcgctgaattatttgggttctgaccagttttctttttgcattaatgtacggtgttcggtttcttgggtctaaaaagacttgcttgtgtctagtatttgtctgtattcttcaaggttcatgttttcacaggatatccgtctcttgtacatacatatgaatcatgtttattatgcctacaatgagttgattgttcctagagatagacgtaatattccttaaccgcttgatacataagcttatgcgattcgctctcaaatttttgaatactagatagaggtcatcagactagcattgaccacttccggggactgagataatcacagctcatcatgctccacggcctgttcgtcggcctcaggcttaggttcagcatcagcttcgactgtctcagcatcaggttcaacctcagcttccgcctcaggcttaacctcagcctcatcactgaccacaataccctcaggcaacttctctttagcaccctcacccaaccgaatggcatcaacccaagactcaatagcgacagccccaaagtccgcatcggcgccactgaaccgacgccaccatccgcgacgcgcattcaacgcgataatttcaaccgtctggccgtcagctaacgccaatgcctcacgcagagtcttagacctggtgttgatagcagggacggcatagagcgggaagaggtgcgttccgcgctgggcgtgcttgtgaccgatctcagctaggcttgcgagcgcctcggtggcaggcgctggaagcgcggcgtcaggctcgctcgcctcagggagaatgactagcacacaggtgccggactttgatgcgagacaggctgagtcgagggattcgggggtagagagggttggaattgggggtgcggggatagggacttgaatcggcttggcggaggggtctgttgtgtcctggttctcggaggcggtgggtttgaggtcctcggcatcgtcgacgatggaggtaggcttggaagcgggcttggacttcggtttcgacttgggcttggagtcggacgcggagcggggggacgcgtcggggttgggtgttgccgcttggctcaggaattctgtgattggcttcttcttcaagtcgccggtgtagattttgtgctcagtatcagcgctggggacgaggacaagcgtcgggaactcggttacgccgaacttcttcacggaggcggattctttgttccgtacttgggcgatgtcaattgcaccgaggaagtcaactgccagagcacggatcagagcaccagttgtacccttctctgtgaagaggatggccttgggccggtcctcgttttgtccaagccatttgtccaagtccttgtctgttgcgcgcttcacgtggttggggatgcggtcgacgactgcgtcgacgatacctttcgcgctgcgcgcaccttggtagtcctcaacacggggcttcccgggcttcttggaaggtgtcactattttcaaggtcgggaagccctggacacccatctgtccgcagaaggctttgttttcgtcatcgtcgcagttgatcgcggcgacttttgcgagtccgtcaaggtttttcgcggctttttcgaatgcgggtttgaggttcttgcaatggccgcaccaaggcgcgtagaatctaagtggaaaaggtgagtgaaggtcggagggtggaggcagagagctagatagcttgagtgcgggagaagcttactcgacgatctatgcaactattagtcgattttgcgcatttaggaagaccataggcactcaccgaggtataattcgaatttgcaataagcgagttgtaggttttaggattcaactggatcaccggcgaattcttggtgtatagtccatcggcgttaacaggcaatgccgcaaggagcgacgtgacaagcaaaagactggcactgtgcagcataattggtgatttggcagcaggtatgaaactcagcaaagaagccaaagaagccaaagaggaataaagaaaagacagatggtccgaagtattaacgcaaggtgtcctgaagctcttggcatgcggaggattactaggtactccgtcctgaagatattcgagtagcaaatatctcactcaatatgcatgctgtatatatatcttgaattagtgtaatgatgtttcccatctcacattaactaggtcttcacgctgtttaaatgattccttcgattggcatccggtggacttgtacagaatcgtctccataagttccgagttccctttctcttcaataaacacaacctagcaatggctagaccaaaagagagccatggcctggccttcctaccccgcgaactcttctggatgattctaggctacttagaaccaaatgaactggtccgctgtcgccgcgtctcacgtgcctggaacgaagcctttagcaacccggccatcctactcgcactcctgaggaaacatttcccatggacaaaagaagtcaaaactttgagccaagagacatctcctgaagaacaagaacaaggtcgtcgtcttttcgaccaggttgcatcacgatacgactacctaaaacgaggaaaaccccgctctatccagaagtaccgcctctgcgatgactttggtggctctggagaccgtgaatggtatcaggtgcagccatgggagtcacacgccagtcatatgaggcgcttcattgaccgccagttctctgaggctttgtggactttcgaggatggcctgctagtctaccccagcgccgatcatcaattcctcgtgctcatggatttggaaacggaccggcagttcatggtaccgttcattattcgtggcaaaattgttcgtcgagtgcggctacagaagagcttgctcgtcgttgagtgggctgaaccaaaggcctttcactggctgaacgatagtgatggcgtgcatcgtcactttgcgtcttcctttgatgtgacgaggggtgaggaccagggctggaatattgtcccgcgcaatgaatggaagattatgtttttagggcatccgctgagcgagcgagatcggttcttctcctcgcatagcaacactcactatgtcatttatatatggcagccaaatcgcagcttgtataccgccgacgaagatgcacccattgagtctttgtttgtctgggacatatcgaaaccatcatcatatcgaccttcattggatcccactggacggctgagagacgactcacctgactctccatcaatcgtggcacgattcggattccgagacctggagttcttcgatatccggcaacgaggctgtccaagcattcaacgattggagattacggttgattcacaggcggtcgaaattacagaaaacgtttgcatctggccggaagacgaagcaccggagccatttggctttcctcggcctattactacaagcattcctctggtcggaaatgggcctcatcggcgccgggattttgacggaattctaccgccttaccgtgggaactgcagcatgctggcagagagtatgaggctagatgggtgcattatgacggacccttggtttggtgttattgctcacgtgactatactcgagcctgatcttggcttttgtcttcacttcgatccttggacgtgggtccaagatcagactatctatttgactatccagacacctcgctcgagcgtcacttgtgacaattgggatttcgtcggtagaggaaagctcgctggtagtgagaaatatctggtgggcgagaattgcaatcgagagctagtgatttaccggtttgatagatgaattgaaggacaagcggactgggccacttctgcggcctttctccttcacgacgcaatgaccctacaaatccgatgatataagaaacgttatatataagagcatacagacgtgattttggaagttctttttagatgtctttagatgcagtacagtgacttttctatatataaccagggattggttttcgtcaattcacctctgctttctcaaaggctatattgatctccttgcgtatctatcatatacctctctcactatttcgtcggtttaatggcaaccgtactgaaccgaattttacaccgtaccaatctatgggtactaggtagaggaagcgattatttatgacacagttgtcttcctctccttattatacaacagctggacgcaatacccaagaagtgcaaagaatttgagctagcctaggggatacacggcctcaatgctatggaatcatagatttgggtatgaacttgtccctgattctggggtttctggtatccatcacgggctatccagcgtcaccgaccaaaaccgcacctcgcacccgagttaatggccattggtggatatggagtgtttcaaacgagagaacgaaggaattaagtgactaaaaagtaatttatatacctttatttcggtcaaatcaagcacacaaagacggaagattcgttttgtgtgatggcgcgtagggtagaattagaagccgaagtgaatatacaggcaaatcagttacgtaccaaaaaaaagataggtgcatgagaaggaagtggtcgtttggtcaggattcaataaactcgattgattatcgggtgcgtagtcggccatgatattggctatgatctcttttttttttctttttgcagtttagacaaaaaatgaagattgaaaagtctcttcctcccaccacccccgggagaccgaacaaacaaaagagaaaaggaaatgtgacccaacatggatcaatcactgctcctgcgtaacagactccaatagaaagccgtagctcgtgaacttgcatctgacacaggccttgatgccacagccagggcaggtgagggtgaatgaaggcatccacaagttgcaatcactgcacatgggacggcagaagtccttgtaccataacccaaggtgggagcaaaagctgggatcgttcccaattgtaataggcgaggcgttcgggactgaaagacgaacttcttccaaccatccacaatagatctccagcataaggccattaagttcaccagcaagatcgttgggggtgtagcgtccatgggggtccgcgagcttttgcttgaggaatgagattagagggagcaacgaatcatggcccaccatgtaggagttgatcagtttgtcaacatcaaaattggaatcgtcagtggcagattcgggatcgtcggtgggagattcgaaatcctcaacggtggccttgaaattcgagtgcttgttgggtgagtcagtgaagctggtggagttgctaattgttgagaagccaaagggcgaatcggtgaagttgctggagttgctacttgttgagaggccaaagggcgaatcattgttagcaacagaagcacaatcagagtgaattggatactcgtcataggaacggagctttctggagtattcgtaggcaaacgtgtcaaatgtgtcggcaggattgcaggtcttgatgttcttctcaggcaggacatgtaccaaattatgcttgtagccaaattcgagatcgtctaaagctccttcgataacattatcaacggtatcggcaaatttggtatctccatcgtgatccttcgccatatctgctagatcacgtttcattcgagcccgcatgttttccctgcggagctctgcccgtgccttctgcacttcgggatcaatgccagcccattcgttctcccactggacattctctgcttcaaattgtgcccgtctcgccttggattcggctgactctgggtccatgtgcacacttgttccgtaactgtagtagtaggtatggctgtgctgacgtcgatcccttggcttgtgtttcgatgctggctcgctacattggcttggccagttggactcgtatccatggcgttctcgctttggcggacgattgtagttgcccttgtaagcccatgttggtgtttcatcctcgggatctagatgtctcttggccttcttttgcagggcctcatcaagtaagcgtcgacggtcttcgtcacggagaatctcgacagcatcttgaatctgtttttaatggcttgtcagcgatattcaacaacttcgtatggcattatcttggtgttgtagacatacttttctgaatctctcaatggtcgttgcagagtttccagccttgtctggatggagcttcaaggcaagacgcttgtaagcaatgttaatgtcagggagtttggcatgtcgcgcaactcctaggatagcgtaggcatcaacgatcacagtggcagttgacatgtttgcggtcactagtggatgtcagtgttgtgttatatgtgtgagttggcttgagattaaatggtcgttgccagtctttggataggcagatggaataagagagacagagagagtaatgtgaaataaatatgaaggagtgtgagcaatcagaacatgctagtgaggaaagtgtgggaaactgttgggatgacaatgactatatcaaaactcacctaggcaccgcccaaacgtaaggagtcaaattagaaagaagggtcaccgtagcgactcgagaaaagagggagatgaatgatgtaacagagaagacgacgagactggagatgagaatgaggatagggaaagaacaagagtagcactggaggaagctgaacaagaggggaatagagaacaaagacgcaaaaaggatctttagagattcgagaacagaaggatcaagaaaggacgaagagagagggaaagaaggaaggatgagaattagggtataagtatgagggcgagggatgcgggaatcctatttaagtagataatcctattgtaaaccgaatcctattgatgagtgggagctatttatcgcttcatcctataatcgcattgaagaacaaagaaactgacctagtctccagggttagggctatacacaaacaatgcaatcgcacgtggctataaatcagatggttcctgttgaatggattaggttagggctagcaaaatctgtacatatgaaatggaaataaattgactctgattttacacaagctgaaggtcgatctaaatatgaacaagtctacactaaaggcgacttggtcctgtaaaagaaagcttctacatatcctcactggcagtggcaccggtgataatctcaaccagctcgccggtaatggtggcctggcgctgacggttgtacaagatctggaacctggaaagctattagagacgaatcttgaaaacattggaggtaaaacatacttgttgatcatctcaccagcattcttggaggcgttctccatggcgttgcgacgagcggagatctcgcaggcgtggccttcagccatggcccagaagaggttgttggccagagcgtactcgcggaggctgctcagaacctgatcgtcaacctcgtaagaagagatgttggctacattggatgttagttgaaacttgatgaactgctcgggcgtaatgaagtctcaccggactgagtgatagcctcctcggagtaggcctcgagagtgatgggctcgtagctctgagcgttaacgaaagtgttgtagatgatacgaacgctggcgtagtcctcgggcaggagagcgatctggtcggcaatggcctgggcatcggcgaaggtggggatgtccttgcagacgttggagaagctcaagacgatgttctcgggggcggcacgggacagcgaagccttggccttctcaccgagaataacaacgtcggcgttggggatatcggccaaaatacggcgggtggccttgctcagaccggagtggataccaccgcaaagacccttgtcggagctggcaacaaccagaagaaccttcttgtcctccagaggcttggtctcggcctgctcgaacaaggtgttggaggtcttaccgtagacgcgggattcatccatagccttctgggcacgggtgagacgagtggacgcgacaatcttcatggtgttggtgatcttctcaatgttcttgatggacttgagacgaccctcaatctcacgcagagtcgcgaaggtggcggcattggcgggggcagggcttgatttcgcagtcagcaattgtcgttctcaactcctctgacatccagcgtattttccactgtcaatggtgtcgaggtcgttgcgtcggagtacgtcgggtggaaggactttagcacgaggtatcggatgagaacttaccgagcgacggcggcaccaccagcccgcagggccgggcggacggcacgggagaacattatgcgagagatttaaagaggaaaaggaacgagcagatggtgactgcgaagaggaggggagtgacgaaggttagacgggaatgcctcgctggtcgggaaggaagttgagaaccagggaggttctgtctccgtgctgccgctaaactagaaagggcaagcatctacggtgcgccattccgactttcaccgcagttgtgcctcaggcatttagtatttacataacatcacttgacgcctcaggcatctcacttgtagtccttagggcctcttttcccattgcattcctccattccaattccccccaacttgtttctctcttttctcgcctcttctcacctgtcttctctgttcctctggattcacccgcaacaatcctctttacgcatgtatcattgatgcagcagatcttataaccatattcttactcttcattggtcagaatttccttgctttcctccttctaccaggcgtctcgatttgcccgactcggcgcacgaggacgcctcccctcaccaaagcaccgatttctctcattttaccctcatttccggcttgctagtccaggggctatcatcatgagctcctcggaggacgacgcaccccttatgcgcgccaatggccgtggtaaaggtgcgttcctcgggttattcggctgcacatctacaatttgtcgcaaaccttcgctctccttgcactttgtcttctcacttctatatctctactttgtacacaatcgcacttttctcatagatcagttctcgatggtgcatctcacactttgacgtcattttcttcacactttgaacatacctcgaacagcattctaacatagcgtttcctgcacttctagtttcttcaaagtctcccgaaaccgtcagaatggcggattccgcccctgccacaaatggccatgttgatcctgggatatccattcgattcggtcctgtggaagacaaggatgtgaagatggaagatgaggaagatgtgctgggtgccggtaagcgcaagtctcggaccagtgtgggcgaaaagaagtcctatgcagaagcagaaagtagcgaagaagatgagcctttggtacgcctatccccatttcgggatgaccttagttattcccggtgcgaccatactgttgctttcggctgaagcgtctgacaattcgacagagcaaacgccgacgcacacatgtgaagcatgaagaccccgagaccgatgacgatgtacccttgggacgcaacggacgcaaacttcccaacgccgccgaaacatccatcggggatgagtctgattccgacgtccccattgaacggaagcttgctgcgcaaaagagaaagattgaacaaactgcggagaaggtggccaaaccttcgcgcaaacctgctgcaccaaagaaagaggctaagcctgcggcggccaagaaacagacaaacggagtcaagaaagagccggccgccagcaaagctgcccccaagaaggtgaaggctgaacctgcaaagaagggcaaagccaaggtgaagtcggaaagccaggacgcggaagaaagggaggcggaggaagaggaggagaatgagtaccgctggtgggaagaccatagcaagggtgatggaaccatcaagtggacaactcttgaacataatggcgtcgtgttccctcccgaatacgaactgctgcctcaaaatgtcaagatgaaatatgacggtgttccggtctctcttgcacccgaagccgaggaggttgctagcttcttcggaaccatgcttaactcgacccacaacgtggaaaaccctgtgtttcagaagaatttcttcggtgacttcaaggaggtcatcaagaaaagcggcggagcgaaggattccaagggcaacaagatcgacatcaaggagtttgcgaaatgtgatttcaagcctatcttcgaattttacgaggctcagcgtgatgaaaagagacatctgccaccagcggagaagaaggctgccaaggctttgaaagatgagcaagaagctccctaccaattctgtgtgtgggacggtcgcaagcagaaggtgggcaacttccgtgtggaaccaccttctctgttccggggccgtggtgagcatccaaagaccgggcgtgtcaagacgcgtgtgcaacctgagcaaatcaccatcaatatcggcaaagatgcgaaggtcccgccgccacctccaggccacaagtggaaggaggtgaagcacgatcaggagggcacctggcttgccatgtggcaggaaaatatcaatggcaactacaagtacgtcatgttagccgccaattccgatgtcaagggccaaagcgattttaagaaattcgagaaagcccgtgaactcaaaaagcacattgagaaaatccgcaaggattatcagaagaacctcaaacatgatatgatggtggaacgacagaaggccacggcagtctatcttatcgatcagtttgccctgcgtgctggaaatgagaaaggtgaagacgaagccgaaactgtcggttgctgttctctgaagtatgagaatgttaccctgaagcccccaaacactgttatctttgatttcttgggtaaggatagtattcggttctacgatgaagtgcaggtcgatctgcaagtcttcaagaacctgaagatcttcaaaaaggcacccaagaagaacggtgatgaaatctttgaccgccttacggtatgccctccctttttcttgcagtcttgaatgttactgacgaaaaaagacttctgctctcaataaacatcttgccaactacatgcaaggtctaactgccaaggttttccgtacctacaacgcatcttacaccatgggttgtgttctcaacgagatgaatgctagcggtggtactatcgccgaaaaagtgaaagcatacaatgatgccaaccgtaaggttgccatcttgtgtaaccacaagcgcactgtcactgctggccatgcgaatgcaatggaaaaaatgggtgaacgagtgggttttcctcattccgccctcatggcgagagtcacaatactgatatatgttttaccacacagatcaagggccttcgataccagaagtggcggctgaagcagcaaatgcttgacttggatccaactctgaagaaaaagaagggcgcggcgttcttcgagatcgatgaggatctcgaccaagaatggatcgaagaacaccaagccttcttgatcgaggagcagagaactaaaatcaacaagaagttcgagaaggagaatgaaaagcgcgttgctgatggtgagaaggaaatgaaggcttccgagctcgaggagcgtctgcaggctatcaaggagatggagaagaagttcaagagggagaacaaaaccggcaaggtcgaggccgaggccagaggcgcaacgattgaaaagctcgaaggtgccatcaccaagatcgaccagcgggtcgaaacaatgtccgtccaagctcaggacaaggaagacaataaggaggttgccctaggtacctcgaagattgtgagttcttctgttctgatttttacaatatcaccagctaattactcccattagaactacattgatcctcgcctcacggtcgtcttcagcaagaaatatgacgtgcccatcgaaaagttcttctctaaggcgctgcgtgagaagttcgaatgggccatcaagtctgttgaggaggaatgggaattttagtctaccgctcgtcgccttgattacttgcgatctccgtctttctcgcacattactttcttcgtactatattttcggttccacctagtttgccttggtcagacgatatgactttcgtttgtttgtcaagcgactctttcaactctaccaattgatctattcggatctttggttgcattggggtgcttggggaagaattgacgctgccattggctttttcatgattttcgttacagagaggcttggctcagagtacaagcctacgttattggtggtcgtgggtacgatatgatcggtatacgccagtatgcacgagggaaaaaaaaaacacaaaaaaaacacatcagaaaaggactcatcgattcggttggctgcatgacttggttaaatgcacacacactcatagcagttgggcaccttgcacagtttctgtcccgctgctctttgtcatttcggtcataggtcaaaaatttcgaatacttcaattcaatcgtttcttttccaatttagcataagctattgtttccctccactcgtagtccaacgtagtagttgcccggtgacatgtaactaggcttgtaacgtagttcttatgtctgagttgtggatatgtcctctgtggaacctgcacaacatatctgcagggtctatgcataatgcatgacatgaacgagactagcgctgtgtgtgattcaaaggtacaactttgcaggttgtatgtggttgatgtctaaaacatacacatcaaaagtatacaagggaacgttgatttgagatgcagatagaatatcagagaaatggaggaagggctcaatatgctgccaatgcagggccatgcaaaaggtaagaatgagggaagaaatcgaaatcgaaacatatatgcagaagacaagagaaaccccccccctcccccccatataatagcgattatcaattacagtacaaggtcgattcacatctagcgatgctagacaggtctgtctggataaatagcttcagaggtaggaggagagagagaggagagtagaggtggacaggagagcgtatggagatgcagatcatgaaagggtcgtgtcgtaggggattcaatgcaacctttttcggacacaatgcgatgagatgaccgatttcctcatcgggtagtggagaccgttaatgaatcatggtgggggatagaaagagtaaaataaccgacggacgggatatcttgaaaaagaaaaaaaaaacgacgaaagaaaagacaaaagatccgaaaactattcgaatcctctctcaacatggccaccagcccatgcgcttatagctgtccacaatttcgcggatgctgtcagccccgaagttcgggtacaatggcttccagccagtctctttctcgaacaatgacccgtcaacgcacatatcctggtccctgagaatatcacgctccaagaacgggctgatcggtcccggtcgcgtgatatttgccctctcgacgagctcagcccaagtctgcagaccgacttcattcatgtcatcgaggacatcgtcgaggttcagcttggcgatctgcgaggcaagcgacccgatgaacgagaccttgaggccgaacacctccgtcaaggccttggcgacgtgttcttgtttcgtgtcgttgtgatcgacaatgttgaaggcaacaaccccgtccttggggtcgatgaaacccttggaggcgcgccacttggcagcctcgaacagcgcgctagcggcgtccttgacgtgcagggtgttaattttcaagtcctttgtgtgcagaagttccagatcctgcttgagatcaacgtggacggcggacagacaaatgcctgtggcgaagtagcccgggtcgtaggcgccatacacgtggggcaggcgtaccgcgcagtactgcaggtttgggattttccgcagttcatccgcggccttgagcctccatgcggccagcttgtgccacggaacgagcttgtcggtctccttgcgtggcgttgagccgcccttgtagacatgcgcggtcgaggtctcgatgaaggcggggatgccgcgtcgggcaatttccttgccgagcgcgactgtcaggccgtagctgcgcacttcgtagacatcgtcgggttgggagtggcgtgtttcgccgccgcagttgaacacatagtcgaattgttcgccattggctcggtcgaatatgcgcgggaaatgttctgtgggagaaccggccttgaggtaagaatttgctacggggtgagggacttagcgccgggccactcacgttcacggctggcatctgcctggacaaacttgtccttggagcatgcctcttcgaattctggggccaaccaagccaattgtggcagaactttgtctaccaaacggacttccgaggctaggttattctcgtggatgtatagcgcgaggtgtcgaccgatgaagcctaaagacggggagtgtcagttgggagggaatcctctttttgaagacaaaaaaaaaaacataccgaggccaccgacaatcagcacggcgggtttttttgcttcagccatttggaatgtgaaagataaaaaagcctccccgcaggttcaggaggatgaaaggggggaaaggcgaaggacgggagaaaggaggggggcggactaaacgggcaaaggggaacaactaaaaagaaacagaaactcagaaaagaatccgaagaatattatttgatggaataagaggaaaaggaaaaaaaccccaaaatttcattattcgggattcgcattctcccctgccaagccggttaatccacgacgttgactacggagtatagcgagtgggttacagtggaaacaccagcatctacctgtgacgtcggaggggagatagtccgtcttagtgagattagtgcgaggggacaattccacttcttttaattatacagagactaatgtgcacagtaggttgtaccatgtgaatttgtatgtagtcctactacttactactccgtatacttcgtacatatataggtaaatccatacatccctgtgttcgttggtcccatggtactgggtttccgatcagccgaaccataaatgtgaatgctaagcctctcccatgcttaattcgactcaatatccaattgggttggtttcggctattgcaggattttcgactgagctttggcttaaaataaatacgtacaaatgttacatagagtcattggaagcaatttcggcatattcgggatattcgcctttggaaattgcagtcgtacatagtgttcttcgagatgaacaattcgaatagtttggtcgaaacttcaccagaatcggccttcggacacacaaccaagaagggaggggacaagaggacaagagcggggcactggcacttgtcaacgggcgcagggcgatcttgtgggcacggcacacaatcgaacagcaaggaaacggttagaagaggggtgagcggctaggtaaggggcttgctcacccgtgtccaactccatagagtctgctttagaggcctgaaaaacatatggaacaaaatgtaacttaaattagagggatgtggtgatatcggaaagatgttggcagattcttcaagaacgggtctggtctgtgccttctcgaatcatatcgcatgctaggaccctcatgctgatagccacatctcgtggtctgtagaacagagataaaattcgtgataacaacataaatttagctaatatagtggagccgcattgtaaagtttgatataagcctcgaaaattctagaaggaaacctcgctacggcattccgaatttatatggcctctttcatgattagcgacctccaaagcccgcttgtcgtgactacaaaatacgtcgactggaatcgaagctaagcatatagaaagcgagagtgtacagttgtgatgtatatatcttgacaggcataagagataacgtaatgtaatggtattaaatctcgttgtctagcgagaagtcggacactgttcttctatgtttttgaatatctttcgctcatgggttctaggaaagcgaccgatggaccatgggttgagttgaacaagccaattgccttcacaggttagtagtctactatgtttgctcataagcgtcgagggtgtgggaagcgtattctcggcttgttgctagtcgtgcagcttagcagtcctagctaacacgcattataatgttgttaataattaaggacgatggtcataaggttgatcactcggcatgtcgtaggtttggtatacacaaagggtgttgtacattggagtatctggatggtcgaagggagctaacacattctcattggtagatgagtatatccctcctacaatcaagtcgcaaccaagggattcggacattcttttaaatgcactaaaacatagatcatatcggcagcgtaaacctaaccactaccagggtccagcaatttctatgtaagatctctcagcctttgatttatacgaatgtggaattggctcatggttgatcactaagaaagagtaacattggaatataggtaggcctaactattgtctcccggcatgctacataggtatcaaacctcttgccttgaatcttggaacggtggagtcggaaagtggggccgatcttgtaccttacagacatgacctattcaatcacatagacgtaattataggttgaacaccttttccatacatatgtatgtaattattcacttttaatgatgagtaaggtaatattgcaggtatctatccgagcctatattctcgttataaaattatgccacattaaatttcctagcgggacgtcggaaggacgctcgagatgaataaacacgaacaaaagatagattcatcttggatacgaatcatgaacacgaaagagttccactcaaagccaatacatttcataatagccaaagtaagatatgttcatactgcaaaagcaagattgagatcacacaagcccataggatcatgatgcgcctagacacttcagcgagtttctgagctccttgatagcggtgtcaacatcgtcgaaagtcagagcagagaccgcccaacgagcatgtttctgcgccaactgcacagtgctatcgtctaggccatgtgatggttgggacgggaaatagggagccgaggcaaccgggacgctcgcagctgagggtggaacatatgtcggagcagcgggaggctggataggagcactagcacctgaagtattgtagaaagaagccgggtccggagtggatacagatggatcctcgggtggcggaggaaaggactggaatgcagtcggggtatctggaagcttaggtaccgaggacgaaccgccgatggtcgctggggttgatgggagctctaatccgcctgtgttgggatcggcatccgctggctgcggaggatacccaggtgcgttgcgaggaacagaagggatctcaggcggaggacgaggtgttgacgatgtccgtgatggatgaagcgactcatcgagagttgatttccgagccagctctcgtccaagacggtcagactcgtctgggatctcttcgatggaggcttgtcctggcttggaggcctgttccgctaccgactcgtcaaaagcctcaacatcaggatcgttgactagttcttcttcctgctttggcgcgggatttgtcacgttgggatcttcaccggctttgaaagcctttacaatccgaaccgcgtggaatttggcgaatttgatccgcccagcaagttctgggtctaaggggccccagattgaacaaagttcaaggaacgtagccgctgcctggaaagtatctgccgtctgcctttttggcgattagtcatttatagcccaaagtatcacacgtggagctcactttgtgactttgttagcgttcatagcggcctcagcacggctgaagacctccaacccaaattgctcgacataggcactcgccgcaacagtgtctgtcactgtatcattgtctgggttttctactttgaactatttcatgccaatatgatcagctgctagatctcaaccacgggatgcggaatagagactagtgtggggagcacgactcacttgttccagcttgtccacgaggcttgtcgtgtagagtttgatcgcatcatcggaattgtgaagacccctttcgataatctggttcacaatatgaaaattgcctatataatagggttcaatcagctcaaatgttcagttgcgctctgcgcggggtcttgcgactcacaccaataggcaatcacaggtttggcattctcgatctgagctgccctgattgcaaatcgcccaatatctgccgatcggagtccagctggtatattactcgtcatggttcaggatttttgtgatgttaaggagaagatgcatgtagtgaacaaatgacgtttggagctcgcggagtttccaccgcccgtgcgggggcctatgtaggggcccttatcggatcttatctactatgcggaccttatctaccacgatttgaagatctatgaaattgcgaaactatttcatgatatatttgtccgactgtactgggtatcattcatcttcattcgtccacttgccaatctccactctctcctcggccaatgcttccacttcaaaatgatcctccacctgccctcctggacccccgatgcgctcaataacaatccacacacagcgtgactcggcattgggtagcaaatcgaaatcatcgattcgtaccccggacgcagcatcgctgtgagttccatcctctgacgtggccagtatctccttatatgacccctgacccagctccacggtcatcaacacaggagatggagcaacagcgcgagagccgatcgtggaccgcttattcctcgcaataagtcggatgcgtgtcaaacgggagacctgtagcgaggccagcatccggtccttacccggagataaaacacccacttcggatagtacggcgcgccgcccagcagactcggaaaccaagggctggactacacacgggatcgtggatgagatccataacgtgaaacggccaagctggtcaggtgcaaaggtagagcagataatggtgtaggtgcctctgtccaagcatctagtctcggccagtgcgcatccgcgacggtactcgccactatctgcaatgatgtctcggcttcgcacgcgcgatatgcgctgcccgtttgaccaaaatatttttacgtgggtcgctagctccgcttcagtggtctcgaccaatatcgagatatctgtcggttcagaaattcgtatactgaattgtggattggagtggtatcgaggtgactcggcattcccgccagctgtcattgttgtccaggaaccacttgccttggtcaagcatagatatttatctagcgatcgtgccacggccacaggagcggttgaaaatgcagagagagtgaaattctgggtagatgatgggagtgattgctgtgagaccactgcggtgtaggttgacttgggaggcatttccagcctcataagcgtgttcggagagtccacgtatggtccacgatggagcgcaccgtcattgagagacactctgcggccatctgcttgaaatatgtagatgctgataaagcccgttccattctccgatcccccagaactaaattgttgctggtttgtcttaaaatgtttcccaagcagcagccagaccgttcctccatcactggagatggagaattggggattcttcacgaagcagccggtcataacttgaccgtgcgacaaatcccaagtaaaatgaatgtcctcgcggtatttgaacaaaccaggattccagttaaggtaaaggttctcgaaattttggagaacttgttcacaatccatccaaaacgtccctggggaaaggggaggtttatcatttaggctgagtgagccgagatcagccgtaaggctgctttgtatgtggggttctgcaccggcccacgggttcttcaaaagaaaccgacgacgaccctggacttcctttaagtccaagatagcataatcgtgctcgcccaccagccccaggccttgttgttctcgttcagtcagcttcccagtgccgatagtcaaaactacatcgccatgtgagaaggcactgtataaacgtccccaaatctcatcggaggtcaaatcgtcgtggtgtaaacagacttgttccgggatccaaccagtaagcacccaaaggtcggtccctgagttacttcctgggaagtcatagcctccacggaccttcaagtaggccttctccacaagagcaggccacaaaaaattcgagttattgcgatcgattacgtggagtgagcgtgtagtctttgacgatggcaatcgatcatctatcactaccttccggaaagatccgttgaagtagaaccgaaatatgtacttcccagaatgcgaaagtatcgggttcctatcctcactgcacgggtacaatgtcggtgatgcatgctgctcggattagcttttcaagattcctcgacgtgggatcaagtaagtccatacctgccctagacctcgttccgatcgagatgttgtggcacagaggctcgcgaccactgagcaatctgtcaagacatcctgcacgagatctgtttgttttgaagtcgacatagctggttcaattgcatcatgtacctgattggccgcgttatttgttcgtagcagatcgtgcggccgtttccagcccgcgaaaatttctctctggcattcagagaggtgcaaatcaggcgcatccctatacccggttagaatagatcagcattgggccatcttctcgacatacgtaaaaggctgccctttgaatacaaactcatcctgaagcggggcgcgactccatggtggaaagatgtagccattaagtttggcgccctcgaggataatgatttcttcacgggtggtgagcttccgcgtggatgccggcggccgtaggctggggaaggctttctggggccccgcacgagcagccgactgccagtcagcagcagccttgatcttctcagctttggacagcaattccttgcattttttatctagttgttttttatcctcggcgggcgccaagcgcaacgctttcatgtaatgctccgcggcattgatggctgcctccaatgccgctttctgggaggtcgctgtggctactgcctcttcagcgctctatcaagtcattagcttccttcaggtataattgagaaacataattcggtaccaatgcttgagatatgtaggactgtgtgggagcaggtctagacatacttgcgttgaccggtcgtggggtatccaggtaatcagatcgaacagcaagtaaattaccggattaggctgagccgagagggccctttacagattgtgaaatattccgcgacttactattgtagagatcgatacatttggtaataattggtatattgagaatactgtacacaatataatgaaaattatcccatcaagcacatatttagttagttaactctgtaaagtgaagtgaagtcatgacataagcccataccgacctcaccccgaagtggacctcggcttgttttttaggtgatagcgccgaggtgcatttgtgaattcccgcatgagctcggtctctctttttttttatggttcgggtgacttcggtatgatcatcgtctctatccatttccccattgtgctttctcctcaatctcaccttctccgttgttcggagccaagctgtgtcgagccccgctcaatatttctcgtgtcgcccggccgctaagagaagcgagccctctccctatatcatattcttaatcgtcgcgttcatttgatttcgaataccctaaaccgacattatgactggtcaatccaaacctgtgctgtcgccatggggcagcgccgtggcgggtgcgacaggcgccgtcctcgcgaacgcgatggtgtacccgcttgacttgtgaggtcccagataaaacagtcctcaaattatcagatcaaatctcgctgactctatcgctcttcatcctgtagagtcaagacaaaactacaagtacaagtcaaggagaagaatgcatccgtgcaagccgacgatgtcgaacattatgaatccaccatggatgccatcaccaaaatcgtggggaaagagggctatagtggtctgtactccggaatggttggagcccttctaggtgtcgcctcaacaaacttcgcatacttctattggtacagcgtcgtaagaacgctctacgtgacttctaccaagtcgtctcaggctcccggcacagcgattgagctttccctgggcgccgtctctggtgccgtggctcagatttttactatcccggtggctgttattacaacccggcagcagacacagccaaagggcgataagaaggggttgatcgagacgggtcgggaggtggtcgagagcgaggacggctggaccggcctgtggcgcggcctgaaggccagcttgattctagtcgttaacccggccatcacctatggtgcataccagcgcctgaaggaggttatcttcccggggaagaacaacctcaagccctgggaggcattccgtgagtagtggcaatcaccggggtcaacaacgacttgctaattatgaaattagtgcttggtgccatgtccaaggctttggccacgatcgcaacccagcctctgatcgtcgcaaaggttggactgcagtctcgcccaccgcctagccggaatggcaagcccttcaagacctttggcgaggtcatgaagcatattgtcgataatgagggtctcttttccctcttcaagggcattggacctcagattctgaagggtcttttggtccaaggtctgctgatgatgacgaaggagaggtatgtgtttctgttcataatttcgcatttgcttgtgctaactctcgcaaaggatggagctccttttcattgtcctgttcgcctacctcaagaacatcaagaaggataaattgcgtaaggcagtggacttggcagcggaaaaggccaagactagcatgcctgctaccctaaagtaattgttttatagtcagacggtgggatttttccgaactgtgtttacctaactggcgcgttggcgtgccattggaaattttggtgggttttgaacagtctagacatttcccggcattttcttgttggaaacacttgatatgatagatacttgtgtttccagcttttcaatatcactatagatctgtacatggtcatgtcatgccttacttgcttaagctcccatgtagtacttgtttttggacgcactatttagctagttataatatccctgattacacatgtagaaaggtcctctatacgtcaatacatttcaccaccttcgtatattatacccaagtaaagtctacaacttccatgtcaatggcgagtatggtagtaatggccgctgagtacctacataagaatgaaagacatttgagaagccacgtaggcatcattttgggcatcattctacaacgatccctccaatagttagttgtagttatttcaaggtcattggttgtttactaataagaggaattggtggttgctgctttaccgcttgactgatcaacttttaccccaacaactgtcaacacccctcaccaaaccctcgttctcacaccacgtaaacttgccacttgtgtggcatgggtcgtgatgcgatggccgccatggagctccgagtcgaccaatgacgaccaaaaacaaacacccggctcctggctctcctccgcggcgaacaacccgagttccatcttcgattggacagcattcacagaagtcagaaccattgtcccaaccctcgtcctgacaagcggcattcttattgcagtgcgcttccaccgccgctacctacggcgcatccccgacgcgcccagcatctcgtcctcgtatcttcgacggcggagcatcttcggccaagtcacaagcgtcggcgatggagacaatttcaggatatttcatacaccgggaggccgcatggctggatggggctggttaccgtggaaaaaagttcccactgtgaagaaggatctgaaggataaaaccgttcgtcacccaccactcacctattcgcttgctgctcagaacaggcataactatgcctctacatatcataccacaggcccattctttatatctacaaatagcttacatattcactcaaccccagatccacatccgcctcgctggcgtcgacgccccagaactaggccacttcggccaccccgaacaacctttcgcgcgagacgcacacgcctggctaacatcctacctgtcaggccggcgagttcgtgccctcgtctaccgccaggatcaatactcgcgcgtggtagcgagtgttttcgtccggcgcgcatttgactttccgccattccgtcggcgggatgtttcttacgaaatgctgaagcgtggcttggctactgtatatgaagcgaaggttggctctgaatttggcggtgaaaagatggagaagaaatatcgcaaggccgagtggcaggctaagaagcgagccagggggctttggaaggattatggtcgtgtcgggtctgcttgggagagtccgagagagtataagaagcggattggtatggaagatcctcctccgatggagaaagggaatgggaaggggaatgggaaggggaatggcaaggggaatgggaaggggaaaaccgggcagaaatagatgaacgggtcgcggtaagctgggcttgcgattgtggctatgagcgtttatatgttgttttttatgttctggcatttgcatttgcatgtgacgagatggcacgactaccatttcactatacagcgttgtaaatgtatggatagtatgcgacaatcatgatcaaatcgcactttgaatgctgaatatgacaccaagtttcgttaatctatacatgcgcggggggttttgttccaaaccaggccccaatttctaaatggacatcaagactcgagtaatccgcctatagattaggagaatacaacgacaaaagtcagtatgcaggctattatttgctcagcagaaccgccgctcaacctcagcgaacaattttgggctaatttcgttggagctattaccctccgcatggaatagacacccttgacggtcatagtgctccaagagggatttgctcgtctcctcaaacttctgtaaacgctgcttccatgtatcgagagaatcgtcctctcgctgcgtcagcggctcgcccgtgacatcgtctctgcctggcacctttggtggatggaagtctgtattatacacgcgccctgagggctcgtggacccagcgtgatgcgatgcgggcgagaatcactgatggaggggtgattatgtgcacgacaaagttgaccgatactaggctgtccaaggctattgcctgagttgcggtacggggaaacccgtcgagaataaatgaggcagagggatcgattgtgtgggctgatgaggaagtatcggctgaagaagatgacgaggatgttgcggatggtgaggatgggagtggtgggaggagccagcccttagatttcatatcatcggagatcaatttcaggatcattgagtcgggaacaaggttgccggactgcattgtggcctcggcttccaggcctattactatgttagagatctctgctctgtacgaaactgcgccgttgctcattctacttaccgaggggtgtgcgtaggcgcacattttctctcaacagatcacctgagctgatggaagccagctgtggaaatcgggatagcagtcgctcagactgtgtcccttttcctactccaggcgcgccaatcaagatgatccgcgcggccttacggagctgctttgtcacatgcgacataatatgggattgctgatgctgatgctgagggctgaggttcaaggttgctggaacggagaattcgacggtttcaaatgctggggatgcgggaggaacgacggggagaaaatatgcacaatatcaggacagcataatggattgaagggaagagtgaaggcctgggattagaaaacaaccggtcgcatatctccaaggctaactcttttgagaatgttgcttctgcggggacgcccggggaggttgatcttttcggctatcggtgaagactccgaggtaagctgtatggcagcactcaagtctatgtaggtaattatgaaaatattatacgagaacataacataactaccccgagcgaagatcaaagacttatatatctacttacaggactcggtatcaatgctcatgtcacatgtcgtgccacatggtcgtagaaaacgctctgatcggggaaagccaccacccgtgctcaggccaagcaccccagggagccccagggagcccccggggccccagggctggggtacagtattacgtaatatgcgccaaccgatttctttcacgtgattctacgcgtgggacgcgttcgcgttgaccaatttagtgcggagatctcatacattcgtttctcgacaacacaatacctacaccatgattcgacaagacgcccatcgcattgatcccaaacgacgggctgttattgaccctaaaaaaagacaatttgctaccccagcgtacaagcagcaggactatgctcaccgtctgaacatttatgaaatacctcctaccgcggagatcaccctcgaacaattcgagcaatgggccattgacagactgaaaagtatgcaaatttacaccttcctgttgtatttctacccactaataccaaacagtcttggccgaaatcgaagcatgctcttatagaaacaaatcccccgccgagacagcgacctacattacacccctgctacagaaattcctccctctctcctccaatacatcctctccctctggcgctgcagacccccgcttgaaaaatgagcgccaaaaggaccattactcccatttcatcctccggttggcgttctcggccacagaggacctccgtcggcgtttcgcccgcgccgagaccatgctgtttagatttcgtttccagcaggacgactcgagggagaagcgcgcattcatcgatagcttgaatctcgattgggaacctgtgggtgactttgaaaagacggagattgcggaaagtctcctcagctccacgcccgggctgcgtcggcttgatgatgagacctggtataaagtcgattgggagaaggttcccgaactggtcgaacggcgcgcggttttcctgaaaaaaggcaaagcttatgttcctggtcgagagcagctgagcatgatcatggctgagtttaccgctcgcttggagcgcgcactcgaggtatgtctgcagtggtgacgcttaatacatgaaatctcgtggctgattaattctagctcacgagtcgtgccctccctcgtttggacgaggatgatcgtctaacgcctattctcaatcatctttcaaagaacttcggcagcgccgagtcggtatactcggaaggcgaagggtatgtggacggatctccgatcacggccagctccatcgaccaactggcccaacagcatttcccgttgtgtatgaagagcttgcacgtgaacttgcgcaagaacaaccacctgaagcacttcggtcgactacagtatacgctcttcctgaagggtattggcttgtccttggaggagtgtattttgttctggcgtcagtcgttcaagggcaagaccgatgacgagttcaactcccaatacaagtacaatatccgtcacgcctatggcgaggtcggtggggatgtgaatcgtcgcggaaagggctatactccctactcgtgccagaagatcctcggcgattcgaatcccggcattggccagactcacggctgtccctatcgccattactcggttgataacttggtgggcttcctccaggccactggcgtcaatgacaaggaagtcctgcggggtgtgcgtgaggacgttggtaagatgcggtatcacattgcttgcaacagagtgttcgaggcgacacacaagaatgagatcaagaaagtcaaggaggatggctcgtggagtcagactgaccttgacacaattgttcatcctaacacctacttcaagcgcagcttcctgttgaagcagatgaccaaggccccgaaggatgcttagggcgtcttttcacatgtcaaattttcatgatataatgtcgggcagtttcccagttttctgttttatagtcggcgtttagagggagcataagcttgtacgagcacatttgaagcaggtggaattgaagcaagataatatatattctaaccattatggtatacaaaatgggagtgtgaccacagctgattcccagagaatcggaaaggatcagaatgacctctcaaatccaggtgcccagcaacgggtcaagtcgttctccgctcaacgagtggacaactttgccatggaatgacggaagttgtcgatattaacatgtttacacacattgtaggctggcgtgaatttgaagaagaaaaagaaaagagcagcagaaactgcgcacgagccgagttttaaggatgttttgatccgggaggcggcagagaccaactgtgctgcaacctggccttactcacggattggacctccacacaacatactcctccatctcgttcattcaatccctaggtattaaacgggactctgatttcttttgggactggattatgctccgggtggctcacttgctttaatttcttggagtagaccctaaatttcaaggttccctctcctcgcgacttctcggtatccgcatataccccctccctttgtcaacacaggaccgagtcccggaacatctacctacaagatggattacgaagcgctcaaggatcaatggagcgatgtggaggaccgcgatggcctcaggctcagttggaacactttcccgagcactcgtatggttcgtgatagtggccctctctgaccttcaccgcatcatccgctgatgcttgatataggaagcgtcccgcttggtcgttcccatcgccgccgtgtacacaccgttgaaggaaaagcccgacgctcccttgctacaatatgagcccgttacttgcaagcagccctgccgagctgtgctcaacccatatgcgtacgtgacatgtcgatctgatatacctcaatgagtagatggactgacgcttggacagcactgttgatgtccgcgcacgagtctggatctgccccttctgtctctcgcgcaaccctctccctccgcattacaaggatattacagagaacacgatacccccagagctccacccccagagcacgacaatcgagtaccaattggcacggccagcccccgctccccccattttcgtctttgtcgtcgatacctgccaggaggatgatagtctgcaggctgtgaaggattccctcatcatgagcttgtctcttctgccgcccaatgcgctggttggtctgattacgttcggtacaatggtaggcaatgatgatcttcgcaacgcaggtgacatgttgttgaccttgatatataggcccaagttcacgagctcggctacatcgaatgcgccaagtcatacgtgttcagaggcaacaaggaatacaacgccaagcaggttcaggagatgctgggcctatccggtggcgtgcgccccggtgttccccaacaacagccagctcgtcctcctcttggcccggctgcgcgcttcctcatgcccgttcaacaggctgagttccagatcaccaatgtcctcgaacaattgcagcgcgatccctggccagtggccaatgacaagcgtcccctgcgctgcaccggtgttgccctgagcgttgccgttggtctgcttgagagttccttccagaacgccggaggccgcatcatgaccttcaccagtggtgcagccactgagggccctggccacgttgtttcgcctgaactgaaggagcctattcgttcgcaccacgatattgaacgggacaatatcaaatactacaagaaggctgttaaggtcggttctcaacgcgtgagtgtattggattttgctaatttgctcctagttctatgatgccctcgctaagcgcgctgccaacaatggccatattgtcgatattttcgccggctgtcttgatcaagtcggtttgctggaaatgaagaatctctccaactttactggcggtcacatgcttctcaccgatagcttcacatcctcacagttcaagcaatcgttcgtgcgcgtgttcgacaaggacgccgccgataacctcttgatgggcttcaatgcatccctcgaggtgctcacgaccaaggaacttaaggttactggtctgattgggcatgccatctcgctgaacaagaagtcaagctctgttggcgagacagaatgcggtatcggtaacacctgtgcatggaagatgtgtggaatggacccatcctctagctacggtatttactttgagattgccaaccagggcggcccagctgctgttcagcctggtcctcaacggggtatgattcagtttttgacatactaccagcattcctctgggcattatcacctgcgagtgaccaccactgcccgccccttgagcggacctgcgggtgacccaaccctggcacaatccttcgaccaagaggctgccgctgtcctcatggcccgtattgcagtgttcaaggcggaggttgatgacggtccagacgtcctgcgctgggttgatcgtatgctgatcagactctgctcccgattcgctgactaccggaaagatgacccgacatcattccgattggaaaagaacttcaccttgtaccctcagttcatgttccatctccgccgaagtcagttcttgcaggttttcaacaactcgcccgatgagactgctttctaccgccacgttttgaaccacgaggatactggtgactctcttgtcatgatccagcccactcttgattcgtactctctggagcaagagggtgctcagccagtgctgctggactccgcttctatccagcccgcccacatcctcctccttgataccttcttccacatcctgatcttcaacggcgagacgattgccgagtggaggaaagccggataccatgaacaagagggatacgagaatctcaagttgcttcttgagcagcctaaagaggatgctagggttcgttcccacctttcttgttgatctttaacctatttactgactgtgtattataggatcttatttccgaccgtttccccctgccgcgtttcatcgtctgcgatgccggtggttcccaggcgcgtttcttgctgtccaagttgaacccgtcgaccacccataccacaggtggctacggtggcggtgtctcatcgcagaccatcttcactgatgacgtatcgctccagacattcatggaccacctgatgaagtgagttttcctgcaattctgatggatccttccatgctaattttattctagacttgctgtatctggaaccagctaggtgttatgagacatggccatgagagcaagggcggtctgtcatcgaccctcgggtcttgtgtatctttagcggtgatttaaatcttttgacgcgatatagtagaagattgaatggactataccattacaggaggatttcttctaatttcctgcaatatttatagctaaaagccctgaaccgccgagaataaaataaatagccgtcttaccatcccaccctgagttagggtgggtctgtcccacataacgagagattctcacaaaacgagagatctctcttttaggtatcttttatatggtatacccgtacaaaaggtacatatatcccatattatgttcttaagcctttggagttaaaggggaaataagagtataaatcaataaaaattttatagttgaattaattggctgataaaagaaatttcagatatcttatatagagaagtaaagaccatatttatgaaagagatatatgtaaaaacatcaacgttctaccgcttagagaatactcaatatttcttcctaatatgttaatagtaaataaaatagacctcctttagactatatatctatcccctactatatctttttgtaagtattcccagaagtgacaaaatctctactatatatatttgtaccttttgtatgggtataccatataaaagatacctaaaaagagaaatatctcgttatgtgggacagacaggtatggggcggtaagatggctacatacccaaagaggcaagaagcttgataagggttttattgtgtcacgtgcttaagcttgcgtgccctaactccaaatttgaatattcgcttagatgagcaagtgtgggccgcgctagcaacgagtctccttcaagtttgatttttttgctccttttcttcctctcctctgtaaccaccctcttcgacaaccaaggaagatcgactacctttcgcactcgccatgcgtaagtatcatctacttggcctattgcaagatggcgactaacattccctcgtgatcagctcccaagttcgatcccaatgaggtgaagatcatgtaagtgaatttttccccacaggtcctctggctgtattcagccaacaggaaactaatcattcttttgtctttagccacctgcgtgtgactggtggtgaggtcggtgcccagtccgctctggcccccaagatcggtcccctcggtctgtctcccaagaagattggtgaagacatcgccaagaacactggcgactggaagggtctccgtgtcaccgtccgcttgaccatccagaaccgtcaggccgccgtctcggttgttccctccgcttcttccctcgtcatcaaggccctcaaggagcctccccgtgaccgcaagaaggagaagaacatcaagcactccaagtccatccccatggatgagatcatcgagattgcccgcatcatgcgcactcgctcgatggccaaggagctccgcggtggtgtccttgagatcctcggtactgctttctccgtcggctgccaggtcgatggccgcagccccaaggatgtctccgacgacgtcaagtccggcgagattgacagtgagttttgcccatttatgagcggttcgatcagctactaacagtctaattagttcccgaggaataaattattctctcttgaatgctcaaaaaagaggaggcctatctgatttctatggcgtgcttctcttaatgatgagatggctagttgcagaatacgaatggttactcaaaaccaacaaaatattcatgagtcatgacctatgataccttttcctaattcgcgagtgcccaattggaacaaattgaccagctcgctgctcgttctttttcctcgttcctttccggttgtattatcctcctttctcccaatccctctcgtgatcctcccgccttctcctatggcgatgagaataatggaaggctatgcccggcgcagccgacagtccatcctttggatggaacccccacaacactctggcccttactgttctttccctacggggattgatcatatcaaaacgtggtataggcttattttaagtggggaagagaaaaccagtcccattactcatcgcggtatccttggagcttgtcttcgtgggtacagtggtccatatttcgggtctacatctcttgcagatgattatccttatttctcgtaggccgtagtctcgctagctccaatgaacgtttctgattatcattttattttgcatctcgtatcaattatttattctgcgcaaggatccgtggggtcggaccaaagtacggagtactttaccatatctaacacagaacctgcaggctgtcagcatgcgtacatatgcaacgtgatgttattgacagttgggcgtaattctaatattgatatgatatggctacttggctgcttacaacataggctgtacggaatgctaggttagaaccctagtatttatttccattgctcctgaccgatatatatattccgaatgaaacgagccccacgcgacaagggcgatgtctgtgctgcaccacgaatttacaattgacatacctagctactccgtacatggtacagaagtagacgtcacaccaaggctgcaaatagccctgcctgcagtctggaacatccaacggccgctacaccacgcagagctcgagccaacaagtatccgagcgtgacgcaccaatggaaattcacatcagaacttagtacggagttctccgtgcagcgattttgttgcccggcatacgtggacaagaacagttgtcctaaattctcctccgtagtggataaatagaaaaagagaatattgtcaataattgctcacgaatggctgtgagattggtcaatataataaaatgaggaatgtcaccgaattaatgtctaacaatccacccataacctcagccctgataaggcgaggtgcatgctcatccacaacgggggctgatccattttgatgtgcgagttgtgtttcgtttattcgcgggatatatttgggtcgaatggagtcggaatatcaagtagaatatcaagtggatattgagattctttcttttattttatttttctctattgacatactgaaagattgagccagtcaacagtgtctgtatcacccgacccgcatgccgctgtacaggaacgttgtgcaggccaaggaaggatgcgacacacggtgggggcagtttgccgatctctgcctatgacacgttaactttatgggaaacggatgaagggttgggatattttctatatctttttttataggtatgtaggtataggagagaaaggtatattatgtgatatacaaaaaacatatgatttaattgcttcgcttcgctccgcaattaaaacaggaggctaagaaatgacggcagggatcgaggtggaaatgcttgcaagttggaaccccagaataataccggataggcaaggatcggaggagccaacaaacggggcctgtcagaagaggatgggaaaaaagggaagaattagggaaaaattagggcaaaagagagaagaagaaagaaaaagaaaaggatgtcaacaaatacggcatactcagtccagtccgagaaggagaacgagagacagtttggattcaatttccttaggttcagctaaagtcccagagcccacagaaaccgagaacgggctcgactcgatcaccggcgggggcgtcaccgatccatcactagtcgccgtgatggaaccaaatgatccacaaggattggatttatggagagccgttggatcaagtggatatttgacatttgatatttggatttgtatgttttggagggattgaagggagggagatggggtatattgtatagcagaggggatatatccagagatagaagagatagaagagatataagagcagcatagagcaatatcagacatagaacataccccattcaacatcctacacattgtgtttctttattttatataaaatttatcttccccccacccgaatccaccgtgtccactcccctcgctctcaccttcaaccttgttctttctgactttgcttgactttcttgatcttctcgttacttttctcctcttcttctcttctctctctcccttccctgcacagagtactccatatcctcttccttcctgctatccccactgattctcttggtctccattattgatctacccctcgcacttgccaagatctcctcttattggctgtatcggacaccagcatcgtgagctggacattctgtctcccttgcatctctgatctcctcttggattttggatttctgatttttttttctgctccctcttatcatacatacttccccatccacacttttcagtcgatgacgataccctgaatccttggtttgcgcaaactgaaaagccgcaaccggctgaattgcttagaactggcttgactggcttcacagaatggggtgtcggaaacgttacaaggatgattgttgaatgttgactccattgacgtgttgagtctttggtatccttgtcgctggtcggccaggtattctgatcccagtggatcgaggagagagcaaagatgtatccgaccgtcgcaccgtttcccccggttcaaccgcaccaccgattacattatcatacaagcaccctcaaccaccacatgtacgatgcgaacgactcccaactccccgtacgcaatgacttctccaaacctctcttcaacacaatgccacgatcgcgcatacaactacctcatccagttcaacgcgtggattcccgcgatggctccggctatagctccagcaccaacgtggccgaacataccctgaggagaaaaacccccaacggaactctggctgtgggatatgatgggacccctaacgataccattcagccaccagcatgcaagcatatcttggtttcgccgatggagcagagccagttcattccgcctcaacaagggatgcagtccgaaaattggcagctcatgctggaccagtcagccaccaagcaaatgaatttccccccggtcttcaaaaatgactccgcaggtaatacaatccaaggagaagtcgttcaagatgtgcatgggacgagctgggttcgtcctgtccattatcctccgggcgttgactccatgttgaaccagactttgcctctgcagccatctcagcgatacctcttgcagaatgggcaatatgtgcccaccgttctcccagcaaccctgcaatcgtgcctaggaccaactgcttcggcaggtactggaccattcggtccgtattggcctgatggagtatacatcccatatcgcccggcagcttttcgtgatgcgcgttttgaatccccgacgccctttacaaagcagatgagccagtctttttacgagctcaaccagccagccttcaaccaagctcaagctccgctgggcagccacacggattcggggcttgcatggggacattctgtgtctgatttgcctacgcaggactctttaatgaaacctctttttccaccacgtcactctgaccaattacctttccatgcccgagccaaccgtcccctatcgggcctttcgcagccactgaacaatgagcccacaaattggtcaagtcgcccactacatggattccaacccccagtccctgccgtagtagcgaacgcggatttcaaggagaaagtcctatcggaggctcacggtgtctatgttgacctcctcgcaaccatccaccacgcccgccgcaacagcaatagtaaggctgccgtggacggttacccccgattcttgaagccgagcatctaccctaaacccccacgacaaccaggtctcgacttttcacaagcccctccgcccgacctcacacgtcataacagttacccagctagtcaatatgacttgcaacgccagaaatttaatgtcgcaggcagccataggtcgaacgatcctacatctacttctcgcgtccagactcgccgcccatccttgaataatttcgctcacagcagagggtcggatacccatatgctcggattgcgtgacacgggctgtccttcaggagtgccgactttcaccaggactcgtggctctctttttaatgagggctcgcctatgtccaatgctgcatctgcattgtcaatgctgtctgacttgtgtgcggaaagtcgttgggaatggatcgacggaatgcttctcgggggttgtttagcctatggcttgggtgattatcacaaagccgtgcggtggtattccaggatcatcgctcgtgactcgacacacgtggaagccatctccaaccttgctgccaccatgttggcactcgatcgccgagaggaggcttcgcaacattggttgcgcgccgtgcaactacggccgagcttctttgaagccgttgaacatctgataggtctactctgtaatagccacagaggcagagaagctgtcaacatcattgattttgtgcagacttcccttcgtcatcccaaagacggcgattgcttcaagacagatgaacatgctagcgaacccgagagtgacgctgagagcaacgtgtctgatgtgtgcatgtatgacaaagcatctttcgagtatgatgatgagatgggacgaatgcagggaatggaacctggctcaccggatgctaaaccccttggttttgcgagcagtggttatgcaatctcaggtgcggagaacgggcgaatgctagctttggtccatgccaaaggtaatatgctttatgctcttggtgataacgcgggagctgcagctgcatttgaggatgccgttctcatcgccgctggccgaagacgacatggtatccaaagcatcattaaacaaatttttgccgccttttctagccctccgagtaatgggtattctcaatccgagaaggagtcccaggagagcattctgctctatcctgatacagcattgaaaacagccaaacttgttttcccagcaggcggcatgccgccggggctccaataccgnnnnnnnnnnnnnnnnnnnnnnnnnnnnnnnnnnnnnnnnnnnnnnnnnnnnnnnnnnnnnnnnnnnnnnnnnnnnnnnnnnnnnnnnnnnnnnnnnnnnnnnnnnnnnnnnnnnnnnnnnnnnnnnnnnnnnnnnnnnnnnnnnnnnnnnnnnnnnnnnnnnnnnnnnnnnnnnnnnnnnnnnnnnnnnnnnnnnnnnnnnnnnnnnnnnnnnnnnnnnnnnnnnnnnnnncccccggggggcgcccccccgccggggctccaatacgtcgccgaaggtattgctcgcaatgcagcaacttccaccacgagcaattctctcctttcattggcgaaaatttaccaggatggcatgtccaacgttggatcctcaggacgaaccaggtcttcccctggtgtccgggatattttggccctctattatctttccctctccctacaacctagcccgtccactgcaaataatgttggaattttgctggcgggcattcaaaataacccaccggcgagaggtttggtgcgttcgaaaggtgagactcagcatcacctcgagatccctggagtcatccctgggagtggaatatccctagccttggcatactacaactatggcttgcatcttgactcgcgacatgcccatttgtataccaacctcggcagcctactcaaagacatcgggcagcttcacgccgccatcaagatgtacgagcaagcggttcagtgcgatggcaacttcgatatcgccttggctaaccttgccaatgctgtcaaggatagcggtaaagttaacgacgccattgtatactacaagcgagctgtcaaggtcaaccccgagtttgccgaggcggtgtgcggattagcaaatgccttgaactctgtctgtaattgggtaggccgtgggggcatcgtcaacgctcgtggcttccgagatcgatggcatgttgatgacaaaggaatgcttcgggattcgctcaacatcgatacgggctctggatggatcaagcgggtagtggatattgtcgaccgacagctcaaggaaggcgaatattggggccgtggcatgttgactgcgagtacggcagagcaattgtgcctgcaactggctcccgctttggaatctactcgctttgcttccagccatcgtatctctctggtaaagcttttccagtcctgggccggacagaaatgggagggatctcgactcgtacgactcgtcgagcgagctatccggtctctcacttggcagtggtatcaggatcgctatgttttcggcaaagattacccgctttccaagtatcgtcgacctcaactcccaggaggtctttctgccccgaatgcacctaccgttctgcctttccataccttcacttgtcccctctcggcgaagcaaatccgtcagatctcccagcgcaatggactgcggatttcaacatcgactcttagactcccctggctgccatccaccgtcttccctccaccgtctccgcctagtccgtaccttcgagttggttatgtgtcatccgacttcaacaaccatcctctcgcacatctgatgcagtctgtgtttgggctgcatgattcctcccgtgtcaaggcgtactgttacgccacgacccccagtgacaaatcggtacatcgccagcagattgagaaagaggcccccgttttttacgacgcgagtggatggccagtcgatcgactagtccagcagattgttgcggatggaattcacatcttggttaacctgaacggctacacgcgaggagctcgcaatgaggtctttgctgcacgcccggcgcctattcacatgtcattcatgggcttcgcaggcaccctcggtgctgagtggtgcgactacatccttgcggatcagctttctattccgccagagacattgagccccggacggcgcaccacacggatcgaggatcgtctcctggaagaagacaatggcgaggaacttgaagactgggtttacggcgagaagattgtttatacccgtgatacctttttctgctgtgatcaccgacagagtgccccagatgctggcgaaaagcacgtatcctgggaagaagaacaagcccggcgttggagaatgcgcaaagaattattccccaagttgagtgatgacactatcatcttgggtaatttcaaccagttgtacaaggtcagtctatttgcgaggctcatcccaaaccacataactaacccccttgcaggttgaacccacgacgttccgaacatggctgcgcatattagcgcgaatccccaacgctgttctctggctcctccgcttcccagacacgggcgaacaaaacctgcgagacatcgctaaagcctgggccggcgaagagacggcatcgcggatcatcttcacggacgtagcgccaaagaacacacatatcgcgcgagcgaaaatcttagacttgtttctcgacacgccggaatgcaacgcccacaccaccgctaccgacgttctctggagcggcaccccgctacttactctcccgcgctacaagtacaaaatgtgctcccgcatggcgagcagtattctcagtagcgcgctccccaactctgaggctggtcagcgcgcccgtgaagatctcatcgcctcgtcggatgaagattacgaaaataaggccatccgcctatgtctggatctgcagtactctggtcatgagggctatgcccgcggccggctggcagatatacgacagatactgttccgggaccgctacaagaataagctcttcgatacggcgcgctgggtacgcgatctggagaatgcttatgaggccgtctgggcgcagtgggtgaacggtgaagaaggtgatgtctggttatgatgtgcactgcgaatataccccttgagcgatttttcctttttccttttcttctgttcattcgcattctattttgcatctacctcgctcctaccttccgccctgggtttgagctggatcatttatgtaatgaatttactttttgcatgtggctttttatgatgtatacgtacattgggaacatttacgaaagagggtctgtcggatggtttcttgggcaggcgtttatgccattgatatttattctctgggttcctggttatgacgacctgtagtctttgtgatttcggtcttttggataaactgaacagcataataggtctaccacaaccttgatccagtgcaatcggcctaccatttcctctgttaatgatttacaaacgcatctcagcaacgaatcacattgtacgggcacattatatggtaagctcgacccctatacttagcagcataatcacatcatatccactcatctaggaataagctgatacccgctgtctccctattgcggtatgcaggatcaagccacgaagccttcagccctgaaaatccctgtttacgattggtacgtcgcccccggcgaccaatagagtcgacgcccgttccagccctgagtcacaatccaagacattcattcatgcgccgagacagcaggccaatcaataccttgatgttggcattggctttggacggagcacaacaaatgttctccccgcatgagcctatcacagcatcacacctccctatctcgtctctctacgatccaagctccatgtcttgagaacgccctccctcccgtctcgcgaggggatggcgtaccaattcggatatcagcatcctatttaacccacgcccagtccaggtctgggtccagatcgacgcccatcagccccaaaccaaaaaccagaactcaaaagccaatctactagcgtgacggaggctgaatcaggacatccgcatttgcatacaggcaaaaacacgccacgtcttcggctctgttgcacattacgcattgcacagtacatacacccctgaaactagtggagtaagtagaaagggcgttaagccatggtctatatcgacatctatctattcctacagagtacacatcatgcacataccccggtcgacgcggcatggcattctggcattatattacatgtccacgccctcggactagggagtaaagtaagacatgcgcttatccgtcttttgtctgcaggttgccaggttgattcccacatggcggtgtccacgcgcgtcgaggattttgagattgaccggtagggattttggtgtgtatatatatagagtgagtgagtgggtttggtttgtatatacaacatacaggtacaggttgtcagagatagaggaatgacacaccgacaagtacttagaatagacaaaatggatacgatgtatatgacaggaagatcaacgacgaacctaaatccgcccgtttgaataaagaaatgccacgttgaaattttaataaaacaatcggcagatatcctaccactactccgtacccacccaggatccccctcgccctcatatccctacatcaaaatacaaacaataaccccctacccttcccatatcccttatcccttacatcacatcgccctctcgttgtcgattcccgtcccagccaagtaagcccgttcgcttcacaacgcccacgagagagacaaaaccatgcaaaccgggaactcacctgtcccatgtgccgtgtcatatctaccagccctagcaggatcacccggttgtccgtaattgtcggctatggagcgttgtgagtggcgtggcgcgggtggggaacaagccacacagatttgtggcgttggatcggtcgattagccgcacagaatcggcacctggagccgaagaaggtggcttgttttgtttttgggcttgtttggatataagatgttattgtcaagatgttattttgtatgcggtacgggagttcaaacaaatggcggagttagaagtatggattctagaactttgacggaggaggaatgatgtgttttaaggcctagagggtccataagtagtccgacgggcctaattgggaatgtgtttcgcaagcaggtgttacttgaattagattagaacaaatgctatactcgaatgtcgcgtagttgctgctcctatacataaccctattaagccgatcacatgtctaagcaatgctagttaactaactagttactctgacaagattgcatcattagcaatgacgatcagcgagagcgagaccgagacccagacccagacccaattccaagatctcttaatcccgagactaacgataaatctggaagccaaggtcaagccccccaacaacggggtggccgttgcgtcacgcgccctccaccatccctgcaagcccgtctcaccattcccctgaaacgaggctcaaagaagaaaaaggggtcgccaggatcattggctcaggattctgtatagattgcgcttcatttcgcttgttgcaacacgcccccccggaaaatgttcgggctgcggagggtccggtggggagacgggaatttctgctatggcatttgccgtgggccgtgggcttccgggcttattggaaaactgctaccacgatgacaatttggcccccaggtctaaaccgcaggatttgaaaggtttcttggggctttgatcgtctaagggtaacaatgaaatagaattccgaatgactgggttctttgtctttggaccttagctttgcgggaacgattgagtttggcccggatagatagggttggtgtttacagtcggactttgtatacggagaagtactggttttctaggttgtaggttgtccatgttgtcaatacatatttgcacatgttaatctaatttcacaaatagatcttctcaaatggttcgcggatctcgacacttcaagcggggcgcatccgacgtaaccacaagcttttccaaggttgtcaacttcagacttgcggtttgtgatatctccatgtagtacctgtttcgtagatcgtttgacaacgtacggagtacatcggttcgttcagcggtggatctatacagacaactatatgttgtacaacatctgtgttactacagcagtataccagaggtagtcgctctgcgattttcgaaatctgctaagcaaaagattgtacagagtacagagtaagagtaagagtgtgacagcgtaggcccaaacggtttcccacagatcgggcaccatgcgagtggtccccgatatctaaagcccgagaagatggcccaccaatcaccgtctaagctgccggtgtgtcatggccgagcaaattcaaattcgagggattccaactcagactcagatttaacttcaatctcctcgatcgatttcctgtagcccatgcaagttgcgtcacttggactgtcacggagatcacgggttggttccttacgcctccatcttagactgtgtctgtactctgatgatccacctcgtgttgtatcaatgaacatatcacaaaagttacatcccattacccaaaagggaatggaaaggacgagggtggcgatcggtgaacactggctatagctagagaatgtagaatgatccatgatgtactcggcaccccacacggagtactccgtactccgtcagctttgcacgatgattttctctatagacttgcacgtcagcgtaagcgaggcgatcgttttaataacatccgaatcggggacaatatattgtccccacgtgacccaaacggcgaaaaagggggccacaggaacgccgtgcttggacccctgcaaagccatgcggaaggcccgacagtcaggaaacagctgcgagaccgttcgctccacatttagacttcttagtgacgggtactccgttgagcttggatagatgggttccgggtgtttcctgggagtgttggtgttctagttgtgctcatgctcgatcaagtatctagttacttactctctcttcgtctactgacacactcctccaatccccgtactcaaacagccgatctaagctcgagtgcacggggcgacgtgatcagcgatgatccctgcaggccgacagggatttatctcaaatacttgccgtgtctctgattggcgaagcgacagggggggggaacaatagtctatcttgagtaaactaagtcgggaaaacaacaaatcaaaattaattaaaattcaaaatctgacaggtccaatctcgggtacaccctagtcgatgttgcattccaggacgacgggttcatcctttcagaaacggcttttcccaggagtacggaaatccgatctggccgtccacacgaggaattgtccacatggctacacaagaactttccctttttgtatttttgacttctctacaaccgtgttccatggaatatacagggatacaaccttggaagcccaggggaaaccaattaatatcttttctccacactctcagttttgaatctatagatagtcccgttcagaggttccaatcattaattaatggttaatctagacaggtggaatagatgaagtgatcgaatagattaaagatttgaggaggcgtctatcggttaccaaataggaagtcccacactcaccatgacaaatacctgggggaccaatcaacttcccagttcttccatatggatctatgcaggtaaggtatgcccctggaggatggaaattacaatatatacgcattcggtacgtattgctgtatttttaccctcccacagtggctgtgctcacccaagggttcagagccataccgtctggtgacaaaaaagcaaaaaaaaaaggtgtggcttgcctttcaacggtttccaccggtggagatctcctctgctgcgacatgcctaacggggcagtctggaaacttcgcactcgtcgatcctctctttcgatccgatctggcgttctgatgcatccatccattgtttttttcttggtacaccagtgtttggactagaaatagtcggtgggctgaaggggacgggaaaaatagattgacctatacttgcgccgttacggtctgggaacaattcaagatatccacatgcgcagattagaatggataacgtcacgtcccgtgtctttgcagctgtctgaataaaaacgacatcggctttaattcagtttccgcccccctccaggcgtcatggagggatccacggtcaactgtcagtgacaggtggcaggtggcccatgcttttcgtttaatttagtgttcttttcttggaaatggattttgataatataaaaagatccaggattaagcgagcctcgaccgggatatagaacagaaaagcaaaaccgtcacgtttgtgatggggtccaagccgtatggaagacagcctgcaaggcatatcacaatgtgccatggaatccgtagatattgtacaagctgatcgacgtcttcacgaatacctcatacctcggggttgttcgggctagagcttttatcacacggaggccccgatttccccatactattgaatccaaaaaagggataaaaggataaaacaataaaacaataaaagaattcctttagaaatttgtcaaactcggtccaccggtccactgctccaccgtggatcatcgcgaggtcgagaaggaaccctggtcgagccaatgagatctcggccttgaccgatggaacatggatcggatatgaatcgaggaagtgttgtgcatggctggctgagtggaatctgggacgtctaaccgcttgtcactcggaagctagatctgcccctggctgtttttggcgtggtatgccccctttctgctttattgttttattgttttagttatattattttatgttagatctataattaattcgtaggatattgtcttagttgtccaattgtcaaacgactatgttgtataccagaatcgaaggctgcttctataacttgcaaatccaaggagctagaaaatcaaaacagttagcgccttgatgatttggaattccagcaacggggctcagggtcgatcactccgatctttttctgctttacgcgtctttcctcagcccgaattcccgggtggtactgaagatcctaacggagtatttttccactccccacgatctatagattacaatagtgtggtatttatttgattttattttctacatgttttaccttgcctgtattattccgaactgtcagctccgagatcttggatcgtgatcttccatagcgggacctgtatttttttcttttggacccgtccccctggtacttaagacttgactactataataacctcttcgtctacttatacttcaactctctttcttctatcatcatatcatcaccatcaccaactaccaccatctaccatcatctaccaccaccattacatctaccaccctactactctcataatgcctgcttcacaccgtcgtggtccttgggtcccagaggaagaccaactcctcacccaactagtctgcgaacaaggccccaacaactgggttcgcatctctcaacacatgcactaccgttcgcccaagcaatgtcgcgaacgttttcaccaaaatctcaagccctcgctaaacagagaccccatctcccccgacgagggcctgatgatcgagcgcatggtcaatgaaatgggaaagcgctgggctgagatagcccgccgcctcggcaatcgcagcgacaacgcagtcaagaactggtggaatggcagcatgaaccgcaagaagcgcggcctgtccactcccaccacttcccgcacttattcaggccgcatcgaggcaccctacacccgcgcctcggcgatgagcccatcgcgctctcgcttctcttcttcctctcgcccctcatggacagagtccatcgaatccgctatctctgaacaatactcccactcgcgccgagaatccatggcttcttccacccgccatctctcccccatctacacactcccctccatcaaccgaccaatcgagactcccctcacctcgcctgctttctcagaggcttcacactccacctcttgcgagccgccttctatggtctcagaccacaattccgtctgttcttcttcgccccgcactttcccctctccgcaactcctgcccttgcccgtcgacctgcgctcgcagtacgagatgcggaggcccagtgtccacgttgtcgaggactcgcccagttacccggctcgctcgctcgagtctctgtcagagatcgcctccacgcagcgctggattggccaccagcccaccctagcctcatggcaccagcctatagacttgcccaagtcttggatctccaggtctgagcctactcgtgacactcgaatggggttggacaatttgctcaattgaaatatacctcacatcatgattgttacgagtctcatttctcaactctgttttccctcgctctatactcctgattccccttggcgctcgggtccatcgatggaacccttcctgtacatttgccgaaagctcctccattttctttgtgtctatgctctcttatagggaggtattatgattttcttttgtatatcttaatgtgtattaccatgtcattttcaaagtctgttcttttgggccttcgtgctcggttctacgttgaatgattattttgcctattttgctgtttgattaggcacgcagtctgggctctctatttctgcatttgggatcgcataataccctgtttatagtaaggatctaattgaataactaataataataatatctaagcatttcactccctacccaaatctgcattccgaccctcctatacacagaccaccgcaagtcgcacatatacgaatgcctctgtactcccacacctccccggttccagccagcctctcgtctaatattgcagattgcaggcatcagggaatgcagtcatgcagcctccaaccgtttcgctctcccctttgcacgggtccccatgaggaatgcgccaccgggcacacgctgtgctcacgaggacggacgcaagggatgtgagagcatgaggcggccctggttctggttagggcctacgcacggaagtaaggacccacccgtctgtctgacaaggcaaggtttgggatacagagatggaacgtgggagattgtagattggaacttgtatagtgtctatgtattgttgcagatgacgtgatgattgatgtttatgcacatgtatactagattccagctagggatggccatttcgttttgggaaataggaaataggataatacctaatgctgatgctgatgctgatgctggctcatgtatggcctgcatccagaccatcacgtaatgcatacatgtacataatgcataacccatgaataccctgcacagtggcaggcaagaatcagacccggacatgacacacacctccaggaaacaaaagaagtctattcgagaggttcgtccgcgcctgcaggagaaaatggaaaatcaaacggtctggcaccgtctcgatctagagtaagattgacattgacggatccactagaggaatggaggatatgtggggctgcctaagctgcctaatacaacgcattaacctaaaacgcagagcgagagagagagagagacagaaagagaaagagagagacaaagagagaaggatgagcggggaaagaactatattcagtatgtacatattccgtataggaactaggatcaacgccacccaaccaggccagggtacggaatagagaccttgattatcccgcctatccgccccatttctctgtgaatgaaaccgatgcgctacggtggtgtttcgctcggatcgcccaggacgggatgagcgttgggacgagagccaatcagcggaggggtcgtgatgcattaggacggatttgtcaccttctgacgggatgaacggcggggctcttggtgttgcatggatcgtggagatgttcatgcaagccctctgttttgttttgttttgttttttttttttctttctctcttttgtcgggtctcactttccgcttcccccgtgaggctgtttggtgcaggttgggctttggccgttgagatttggtttttgatttaatttggtggttgggttggggtatggtaaccatgtttatgccgtttcatcgtggtatttgggtctgtttcatttgatctgtttcgagtccactataggattatcatcgtctattctatcaaatcatcagctccacattaggatggcgagatgatggcagctatcgcttccacacaccatctcgaaaataattgatcggatattatctaccattcgtcgaatcagatcgagtagattgacttccgatgtgataggacacagtagctcggtaaatcataagctaattaggaattctatcttatacagtaccttgtatttcaacattggcattgtgaagatctgcaggctcccagtatgtattgtgcatcttttggcttgcataccgtccatactgtttgtttacttaccttttgcctgtggatccgaatgtgaccgtggaactcacacggcaggaaacctgaatctcaagggcaaaacaccccaggaaactctaattccttgatccaaagcatagggcaaagaaagttcaaggactgccgctaacactgccctgaccaccgcccggcacctgcgcacgatggccaaaatgaaaaacggcgccaaggccagatcagatcgtatccgtttatcagtggatattaatatacatagcattagttaccatgggagaagggagcaccgtgccaaatacatatattcatccatggtttgccatacacacgttgcagctcgaatccatggattcattcttctgccgttgcattccaagctcccgatcctgtgatcgacagccacatcgccttatagagcagtcatgccgggatcaattgtgggatccatccatatgcgcaagagctgagatcgagattcggacaccgatagattatcagcatccatagactttggatgttactttatttggtattacgtctgtactgataatacagagctctctgattggcccacggagaatctcggtgtaatcccacgccagtcctaaaatagctctagcgcagaaaggtacctgtctgtcggtacgcacgatggctgccgtcccctgagcatatccgcggacaaggtgtgaggtgaccgttcctcgggacttttcccgaagtcaaagcctccattttccagtgctgctaaccgtgcaagtcccttcattttcctttctgggtaattcgctccggtggcggtcgtaggggcttccggcgctctcttaggggcgccagctcgcgtggcaggaatccgcaggattctagttgacagggttgtttgaagtctcttgcttcattgggatgctctttctgtattgggtgttttttttctttgagggtttctaacggttgcgtaattgtttctgggattttgagttcaagtggagttgtttatggagcccgtactatctatcgtcacgcttgtactccgtagatgcacaaccgacaacctcaggggttattgggattattgacgtggtccttcctaatacggttgaggagttttactttgtgatgggattatagtttactgggacaatgcttagcaacggtggactagcaaatgttgatatctagaaggagacatggtaagtcttcccctttactgccgacagaagacaggcatactctgaatcggacattcgatctcaacatcgcgaccgccctcatacacagtatcttttccgtcccagagcttccacgatgccccagccggcagatagaccttgaccttgcgctgaccgggctcaaacacaggcacaaccaagtacttcgacccaaacatatactgagtctcgacctcccaagctggttcatccgacgggaactcgtaaaacaaagtcctcatcacaggagtccccttctcatgagcctcccgcatcaacccgcgcgtgtactcgcgaagctgctcgcgaatcccaatataccgtttacagatttcataaacctcatccccatatgaccagatctcattatccgccccgctagccgtcggccgtccctccggcttcggctcacggtcaccatgtagccgcatcaccggacagaacgctccccactggaaccatctcgtgaacagctcgcggaacgcaggatccttggggttgccgccgtggaaaccgccaatatcggtcgtccaccatgggatcccggctagccccatgttcaggcccgctgcgagttggttgcggaaggagctccacgacgacgcgatgtcgccgctccacacgagcgctccgtacttctgactgcccgcccatgcacaccgcaggagattgacgatgttcgtttgaccctctgcggtcatgccttcgtagaaaccccgggcgtactctttcgggtaggtgtttccgacctgcaggttgctgccggcgtggtagcggtagatatcgaagtcgtagatcgagtactcaggctcggcttcgtcgagccagaatgttttgatacctatgttgtagtagttttgcttggcttgactccagatgaactttcgggctgccgggttcgttgcgtcgaagtgtgtgatgtcgccatcgcattgcatcgctacgcgcatgccgcggtcgtgacggatgagaagcccttgttcgagcatctctgggaagttctcggatgcattttcaacggtgggccagatggaaaccatgagctcaactttgagctctttaagctccttgaccatggcctctggaatcggacattgttagcgggtcgtgctatcgatgtaaaaaagagaatgacagctcacccggatctggccagaactccggatcaaagctccattctccttggtgcttccaatgaaagaagtcaatgacaatcaaatccagaggaacctcgcgccgccggtactcgcgcgcaatttcgagcagctgctcctggttcgtgtagcggagcttgcactgccagaaaccaaggccatattctggcatcatgggaacataacccgtcactttggcgtaggcttcttcaatttccgcgggggtgtcacccgatacaacccagtagtccaatgccttggtcgaatacgcctcaaagctcatgatatttgttcccagaaccgcccgtccaatgccggggttattccagaggaagccgtagccgagcgacgaaaccgcaaagggaacactggcctgggagttgcggtgcgccagttccaggtccgtacctttcaggttcaggtagggctgctgatactgtcccataccgaagatcttctctttgcgatcgagagactcgaatcgcatcgtgaggtggtagtcgccgcctaggattggacgcatctcgcgagcttcgatagtcagcgcgctgcacttggggtccattggatccaggcggtggcgggcatactcctcgaggagtttgtttcccttcgaatcgtagacgataatcttgcctctgcgtgacacagttgctttgatcttgccgtttgtaatagtcgcttcttggtcagtagatatctcaatgcttaggtttgggctgggtggcttggaggagagggcccaatcttccattggaattgacgcctgtctcgttgcacgtacgcggaaggcattctctccccatggctgcacccagaggatatggtcgtcgaaacggaagatgagcttgtcatcttcggtgtagagcattttggtaaaacaagttgttagtggtattaatctacttttcctgatggaagaagaggcgatttgtcttaacagatgagctgtctagttcaaagagccgggaattaagtattgagggaatggaatggtacccctcaccatgcaatcctgatgctgtgacagggctaacaccgatgacaaggcagatccactgcatgaagtaccagtaacaacactcatttattcgaggaaacttctaagatgcctcaggggtggtgaggtggatatgtgtacctttaaacgcctcgagatcataggtagcatccgtcacgagtttagcctaaagtcggccttccaaatagagcaaggacatgactccgtgtcttccaaaagaggaagtttatatcgtatgaatgaagctgccacttatagtcttcattatgtgctacctatccgaggaaaatgttcaatgatagtagatgtagaaaaagtcattagcaatacgagaaattctttatgtgggaagttggattggaaatttaggcttgggagctgcagcatatacaagccattgtgtgcatatcgatgttaactagttaaatgcctatcgaatttggtgaatgagccaacgatacgtcttttatcatgaacaatatcaccacaagaactggttcttcggtaaggagaaataatcaaatatgtggcaatagttaggagttagcgaccctttaagaaaggagaaagagaaggcatctcttctgatccaacggtcatttcagctaacatattaccaaccacaactttgaggtaagactgctgtaggtaggccgatatcacagaacatgagtatatgagatgtagggttatgtaggattactacgatgtgctattatccttccgtggtctactattgctacgtattaacatattccggaatctcgtggtcattactgactactcagttctaaacttcataccttctttatctgaatttcaggagatcaaagaagcccctagttttgttctacaaagagagtcctttagcacataaacctatggcagagaagagatgttagggcttaaacaacttgtgtataatgcaccatggctagatctcaattcatatggtctatcagttttgttggaagataattccctgtgtttggccaatttatcactatagtcaaaatttgactctcactttcgccttaattagacgtttataagccaatacagcgtacctatgaggtatagtatttcggtgccgagagaccatgttaccatccctgtcttccaactcttcttttttgcttaaactttcaagtatcaaagcaaatcagcttgagctcattcgtaattcatcatcagacccaagattcaacaatactaaaccgttcagacgtccacgggaggttccttgatattgccggctggtgttccccggaaaaaggacgctattccttatcaggacagagagtcaagctaccagcgggcacggttttcatcttgcattgctcatcctatccccttaattgtcaatctcattcgaaccgctagctgagatcatatctgagccttcgattcatccagcgaagcctgaatcatggcattcagtggggccgccgaggctcctaccgcggacatggacatcgacatggacctcgacctaggaccagagcccgagcccgagctaattcaggtggtaagggtttgcttttgtctttatagctatagtcgattgtcaactaacatgtgtcgagtgctaggaaacaactccgaacttagaaatcaccgtcgaccccctcaccgatgaagcggtctacgaaaaagtgcatgttcgcggtgtcgatgaaatgaccacggagaatatcaagcaatttgctcgcgactgctctggacaggagccagtgcgcgtcgaatggatcgacgacacatccgccaacctcgtcttctcctccgccgaaatcggcctccaagctctcacagctctcacccaagtcgccgaggaagaagacgcgtctaccttgccacctctgcgtctccgatcggcgaaactcctctcctcccaccctgattccgtcctccaagtgcgatcggctgtcaagtcggaccgcaagcaagcacgcgctcatgagaagagtcgcttctacctcatgcaccccgagcatgatccccgagaacgcttgcggcaagagtttgcggacaggagacgtagcgatgatgcaggggatggcgactacagccggcgcagattcgacgaccgggagcaccggcgccgccgagaccgcgccgaggatgaccacttcaatgcggacatgtacggtgataatgttggctctgaacccgagcgcgctcggggaaagcctagaggtcgcggccagagagagctgttcccagatgccgagggccgatccagtggacgtctccggaatcgcagtgcgtctccaggacgagacacgttggaggaagaacttggagttaatcgaggcggtggtgataataacaggcggttccgtgagaggtcgcctagaggtcgtaagaacaaaagtaaagagcttttcccaagcgcgagcgagagcgagtcaggaaaccgcgagcttttcccaaacaagcccacatccagctacatcaagaaagagttgttgcccagcaaggctagtcaccatcgccggtcagatgcattcgacgcttcttctgccccgggcacctctgaacacagacgccacagcaatattgagctcttccctgattccaccaacaatggcgcccgcattcgtggagcagccacaaccaccgaggaccaaggatttgccatccgaggcggctcatcgagcggcatgtcgattaaaggcaagggtgcgtcggtgcgcgagctgtttccttccaaatacgacaatggcaccaacaataacatcaaagttggcgccaacgctggcaaggaattgttttctgagacactagagggacgcggcggtcgtcggcgtcgggctgaggatatgttcagctgaatagactaagcgataggccgagaacttgtgcatttgcttgattatgaggcttcgggagcatggtggatatccggcgtttcaagaatgggatggggaaatcgattgtctgataaaagtttcataatgaaacatactctgctctgctgatgggtggaacccgtatattttctgtaatctccaatataacgcaaaagaagatatagaccaaagtaacattagttgagtcgtgcatgggaatatatatacaagtcgcgttgtgcgcgactaactctccccaaccaaaatccttccgaggcatcagatacaagcatggccacctccagaacaattgatgcactagcaagtgctatagttgcgcgattcctgcgcaacaatgactattcagagacactgaaggcttttatccgcgaggctgaccttgctcctgacgtggggcagacctcgggcgacgacaccaacaactggaccatccaaagtttgcttgaagagaagagcacatatgaccaaactgtgaattttgaaagatatggaaaaggcaatcagcagtcgactttatggagcgagccaggtgggttttattccggaatggcagtcgaaagtcattgggactcggcctagctttaactatcagcggttgcctttgttctggtatctgacagacttctagcaccatcaagaccttctatcatccagacaccgacatcatcaaatatccttgctgcgtcggtagagcaatggcagaaaccccgcggcgatgccgatcaagtcgccgcagacgctgcaccagcgcagtcgtatatcgtctccacgggtgcagacaggcaagtacatttactccagacggcagaaggtaatacggctgtcaaatcattctcgggaatctctgattcgcctgttctatcggttgtctcgatcctccagggccagtacatcctcatgaccaacatgtctggacagctgctcctccagcatggatcccaaacactggacagcaggaaggaccacgcaaagtacgcagtgaaggtggtagtctacaaagacaaggctgatccttccaagtggtgggttgccaccgccgggtgggacgagtgtgttttcttatattgcctcaatattcccgacgaagtagacgcgctatctctcacaattggtgagcccgttgcacgcattaaactcaactcaaacccggattcactattgttcgtcccacacgtggacaccaacgagctgctccttctcgtctcgcgcagagactcgacttatatctactactaccaggtagaagcatcggaagaaaccgatactcgtgcaaatgatgaacccgctgccgagaagtcaccgcgggaagctcgcctccttggacagcagaatctggccccccattccaatgcctgggttgcgttctcgccggtccacatggcgctcagtccacacgacccaggcctcctggccgtagcgacgtcgacattgccccatttgaaagtgatcatcgtgcgtctgctattccctgcaacgaccgcttcagaggacccggtgacacaggcgtctcaggcactggcaacactggaactgcagaaccgtgaggatgctgctatcctcgtgcaggcaaacaccttctcgccgcaaactgcttactccacaccgcaagtggcatggcggcctaatgggtctggcatctgggtcaatggagatgatggtgtggttcgtggcattgagacgaagacggggaagatcattgctacgttgaagggtggtcatgactctggctttaaggtgaggactgtttggtcgggtcttgttgctgtaccccaagaagagggtgacccggtctgggaggaatgggttatcagtggtgggtttgataaaaggttgattatttggaaggtatgacctttgtgactataccgaatatccaggccaatacgagtgtcatggacgtgaaagcaaatgtgaagtagaggtaaacgaattgatttagacataactaaatataaaaacgactgttactgtctacgggatgtagcccccctgaccatgaaccctgtcgcatcgagaagaatcaagacaggatatatagcaatcggggacttgggggttcttcttggcacgttaagaaaaaatccttcagcaatcgcgcatgagaaaagcacgcagctgtacacacatatgccggacgggagttctgggaaaaggggagaaactaagctcaagggccacaacacagacgaagttgagtcctcgggtctagaagaaaaaaaaaaagaaagggatatagcagaagagattccgcttgggaaaatggcaccgctgtgcacatcgaattaagcctgttgatttcctgatatcaaacaactcgaggctcgtcgcgcaagaaataagcaaaaatcaggcctattcgacacagcggaccgtccttgatcgtcacacacgttatgttctctggacctcttgcacgctcgagttgcatttcatgtttcccatttttttaagactgagttcataatctatgcgacctcgcgcttgccctccttgcgctccttctgttcaatgtgtcagtactccgttccataggtaatggatggtgggttcgggttgtggtcaacgtacaagggccttcatggtgccgtggagagcgtgacggtggttgcggcggaacttggggtcgacaccgttgagggaagggtaacggttggtcttgggcttcttgatactgttcggacaaatatatcagcgactcgattcagggtgagatggtgtggcggatggtggtcgaatgcagtggttcgaagagattgcccgggcgaatattccaagtcgttgacctcaagattcatcacgccggataaaaccattcgcacactagcacttcttccaccatgttcattggattgattgaaaaatgtcggacaagtgtaatagtagggtgaccgaggaagttcaagggcaaacgtacccgttacggtgagccttctggctgctgtggtgctgggacgcgttcttggactctgtaggtgaaaatcatgtcagcgccatcgcctttttttcttctctctcgccagcttgcagaggagcgaaagtcatagggtcgtggtaaaaacgtactggccatcttgtcggatgttgtcgctgattgacggtgatagatggagaggagtgggaatagggacgtcaggcctaagaggctcggctagggctcgttccgtttgtgggatctcgcttattgggcggtgtacatactacagcttcactaggtgacttcttacttgcaagattgtcccagaaaacgttgtgctattttgattggtcttgtatcctgttatatttcattttgccgttctacctggttggaaatcggggtctttttaactcgcttttagcagttcttcagtccgcgagtttttctcccttcattctgccacttaatacacgtgacctatatatatatatcacgtgccagatacttccaatgctgtctacgaggtattgaagaagagatttgatttcggaggcgacttgatagtagcaagtgcagtatacagatacaatgtattgtgcctgattactcttagcgagaattcctgcaccaacttgttctcggccgcaaatattacattaggaatcggagttctggcaggaacttatattctaaaatggataaatactaaaatacatagcacaggaattgaatatgtgttctctccttgtgttctcaaaatatgcatacaatgactgtagccaacgcagctcatactggccatggtccggccgttgaattcccgtgccacgtgacccgccgctagggaacaaccggcattccgacttcgacctttgcaacgcaacttcaagacggataatccagcctttgcacgtcatccaccactgcaaaatgagctccttccgctttgctcgctccgccctccgggctcgcccttctttcctcggtgctcccgtccagcgccgtggttacgctgaggctgtcgccgacaagatcaagctgtccctgactctgcctcaccaggtacgtgaacgaagtccggccggcatcccaacatcatagcctaagtactgacttgataattgcttgacagaccatctaccgctcgactggcgtgtatgttatgcttccaattgcgcccgcgtcgacggtgcctccgcccttttcctaaatactgaccaaccttcgcgatcacagtacccaggtcaaccttcccgccgcctccggtgagatgggtgttctcgccaaccacgttccctctatcgagcagctcaaccccggtctcgtcgagatcatcgaggagagcggtgctaccaagcagtacttccgtacgtccgatctttgcgctctgaaacatttcgcaaatctggtctcttgtgaattggaatcaatcgactaacaacggtgctactgtatagtgtccggtggtttcgccgtcgtccagcccgactcccagctcagcatcaacgctgtcgagggcttcccccttgaggacttcagcgccgatgtaggttttttttttcctttccaatgtcgcgactaaagcttactggagcttccttactaggctatccgcgcccagatcaccgaggcccagaagattgccagcggcagcggcagcgagcaggatatcgccgaggccaagattgagctcgaggtatgaacccgcgggactaccggactggttaattactgactttccttttcttgaacaggttctcgagagcttgcaggctcacgtcaaataaatttgatgtacataaccattatcgcctaaaccatgaacctgtagaattatagcagttctcccttccctctaattatacgtgtttattatatctgtctacattctatgcggtagaggcgggagcgcaccttccaagcttggaagttaagcacatgacttgcccatttcatctccaatccccgacccgacggtcgactgttatcttcagctgaccgtgcaaacatggcattcgccaaatcactcaagtcagaccctctgggcatggtggatactcgattgatgatgacggactcaccaatggatggtttcttttcacctctctttgcgccattcaccgggcttgatggaactgacgaaagacaaccaagcagccgccagccagaagcagaagcaagcccgaagcaagctcacggaagcgtcgaatttcgcgagtctttccgtggtttcgattccagccgaaaatgtcctcgacttgagttggatgtcgctgtggataagtaccacgctcttgacggtctcactgaaccattgaatccccaaaacacccccgcatcaaatagcgaacgagggagcatagaggaatctactgagtcgcttcgatgctataaaatggagaacgtacagacgagtcctgcgcctgggacgggggagttcaatttcgattgcttccaagattcgccagaggcaagctttgtttatcaagacgacggaagtgaatctcctaaaccctcaaagttgcgacgcctttcggttggccgccgacagtggatcaaacctcctgttactgccctggcgaatcgtcagccaagcatgaatgccggtgacttcaagaaatccagcaattctggtccactaccgcgatgcgttcgattttctcctcctgcggcctctctgtcttcgccttctcgtgcgacacgtcgtcccctaccttcgattgaaagaagacaggattatgttgcttttcatcgacagaagaaacaacaccggaaatggaagatcactggtcgcgcgaactctcgaaaaagctcaccatgcaacatccctacaaaaagaatcatcccaaagaaccatgatctgcgtgactcgtctctttgcagcttaacctatcgtgaaacaggtcaaacaactctccccgctcgtgttggctcgggtagtgatgcccgggaagtgagagccggcaatgtgggcgacactcctgttgcagatgactcgaaaataacgggtaacaccgagcagaacatccctgcatttcttgctgtttcgttttcgctttacagaaccagacctgcgcctagctcatccattgagaaagcatcaaagtacgcattcaaatttcgaatgactcgaactgatctccctcagcaaccttctccgcatttccctaccgaatttgaaaacatcacttgccacccgatcattgatgacttgctattacacacttgcttcatcatcccggcgcgggttgtactactacctctcaatgtcatcttcgttgcaacatacccattgacaaacacccgggtcggcgttgtaatgctctaccttgccagagctttactgtatctactgacgagaaccatccttcttgtgttgtccaagtgcggagtgtcttgtggctgtcagtggaacccggacacggccattcggactcagtagcttcacccttagggtgagcaattgaggttgaacaagatcgaagcgacatgtgcaccagcgaattccgttcgtatttcctccaaagacagttttatgcagtattctacgcgtaccttggttcacgcgggtgagaaatgagtttagtcactatttgatacatttttgtggccgaaagccgagttatgggtaggaatgaaacagatttttccagaatggagtctcttgtattagtttttagtagagaaattcccactgaactaaagtaaatgagatgagaggattcaattgacttatagggactctccatgtctacataggtcactatcatgacgggctaccaagcaagcagttgtcaagaaggatgagagataataatgaaacaaaatgaattcaatctacacatcgatgcacacccccagagctaaccttagcactcgaataccttgctttagaataaaaaattcacactttaatttcttgcattacaaaattatagaatcgatcctatgcagtctcttctcgctttgaacctccattgattagccttaccacagcatgttaatcttagcgaggacaggccgcaggatatcctgttttgagctgaacatgagatagtcagaaattaggcgttagattatttgtgagggcttctaatctccgtgaacaatgtccgagatcatgggcatctatacctaaggttcaatgtagggtctactgcacagaatattgttcgatattaaccgcataactctctaagctgcactcggttatgcctcaggagaaccccaggaagaataggacagataaccaataccaagaccgggtatatcagcacaaacatgaagacaagaagaccagcaaaaagctagctaacaacccaataaaagatcctttaaatcgctgacatcataaaaataggaatgagaaaggaaatgctaactaaaaaaatcatttcgtcgcctcaagagcacatttaagaaagatggaaaacatatcaaaaaggcatagtaacgtgacataaggtttggggggagggggtcatttatatcaacacggctctgaaggacataactcgttttgtacacgtcgtaagctgagtctgtagtagacacaagagagaaaaaagcagagaactctagacggtactaagaaagcgatcacgtgaattccacaccgtgctgctgctgcctctcttgtcgggtccgggctcgttcagcacgtctgcggcgacgattgttcgcgtaagagccgctcatctcagtaccggtatatgtaggcgaagtgacactgcctggcccatatgggttgctggaaggcgcaggaatgggaggtggcatgctgcctgaaggtgcctgtggaggggcaaggcgagcagcagcagcagcctgttcacgtcgcatctgctcgtcttgttgacgttcgagttcttcaacgcgacgccagcggtcgtggccggcgtcttcgttgccagacaaggagcctgcactgctgttgcgacgtcgagagcttcttcgctctctgcgacgggcctcacggctcgcggccgcttcttcttcggtcagccgacggagtgtcacatgtcgtccgtcattgtgcattttcactttcacagataccggcggggaggcaacgtcgtcctctcggcgccggctgctgctccgattacggcgggcggctgcatctagtgctgccccagcagccgcacctgatgcaaattctgctccatcatgggcgagagagtgacgtgagtgaggatcttcagagaactgctggtggctcgggggcataggcggcatatctgatacaacgctatggacagcaccagaggcgagtggctctgcagtaagaagagattctccatgtgatgcgtgtcgaggtggaggacgggacagatcggtttcagtgagatcagtttcactatacgaactggcccttcttcgtgggtagaaacttcctcctgtctgtggccgtcgtttgctgtttgctctctgcagcgcctcatcttcatcttctcggcgcctgatatcttccagccgccgtttctcttcatcgtcctttttaccgcggctaaacagtcgcttcacggcagcaaaagcacctgcacccagaacagcgtctctaaccccatgagaagcgtttcgcttaggaggctcagtgagatatgtgctgttgtaatagtaagacgaccccgggctttgggacctgcttggtacacggctcggtggtcgattaaggggcgtgtggtgtgtcggctccggtcgaccatcttctatcctgctgagagattcatccgtgtggctagtactgcgcgaatgggcgggtctgtaacgacccgattcggcatcatcttctcgcttttttcgacgattccagaaattcttggccatgagaccagccccagccagtgcaccaagctcgaggagtttcttgccgaaaccaccaccaccatgatgacgggaagcttcatctgaatatttttcatcagagatagatgtgcgagagtcttcataagcatggcttgggtggcgactgcttgaacgccgtcgaaacattgaagctaggccagcacccgcagcgccggcggcgagagcttctgccgcatgattgccatggtgctctgatatctctgaaggtcctgtataatgactgcggtcatcaccgtggtcacttcccatgtggtatccttcaaagtcatatcggtaggaaagtaaaaagtaaagaaccaagtagccgaaagctgtcagcgcgaataggatgaataggacctttggcgaaccgtagagcgtgagtcctagtggaatttgagcaattccgagaagtagaagtgcacgacccagccaccggtgaacctaagacatgttagaagagcccttatatcccttcttgagacttcacttaccaccagtttcaaaggaacgtgaactcgccgtctcttactctctttcttgtgcacaaaccagccccacagcacctgaaaaataaccaaaacatagattgccaggccgattccatgatgtgggttggttaggcttctttgtggcccaacggcgaaccacccaagcacaaacacaaccgtggtcaagagcagggtaagtacctggcaccaagcatgcaatttgaatgcccagtaaggattccatcgggagtaatatcggattatgaaagttgatattgggacgatgcccaagaaaacgattgttgcaatgacgccgtgcgcgatgattatggaatggtacccggccatatccttgaaacggttccccatgcctgtaaagtgtcagtcattacaagataattgaaagggtgtacaccattatgaaagccgattgttgatgcgtccgactaaccattgtatcgcatcgtctcaaagttgacccccatcaaattgggcagtaggaaggtatcccgcccagagtcccaggtgccatccccaacatgaagggtattggatgaatatgtgctgctccctgcagcggcgagatctgagtttgacattttgcggataattctcgaatgaccatgcgatcttcagtctggaatgtcagatttaccgaaggagatctttcgagatctcccgatccgaggaatgcaccatgcgataatgggatcgagatttcgactggaatgcccaatgacagtcaacgaaactgattgtatgttgaccaatttatgggcgctggactgatcgtatcacaagatctaagtatggttcgagaaagccgtatagtaagagtcgaggcggagcgcaagaagagggaaagaaagaaagtcgtacggattcggatgtgagattaggataggattgaaaaagcgtccgacaacgagattgacatagaataataaagatgcatgtcacacggaaacatcgggcagagaggaatcacaacaagaggctgagcgatttccccagccatctgttttcctatgacaaattaccgggccaaccagccgctgactcagcatgggtattgtaaccgccttccaaagtcggttaggctgttgcctcgttatcttatctgccttatcctcagctgatcttatcacaagattgcgtgctgtgttcgatggagctcgaatcgttacatcccacaccttctcttcttcccccgcctgacactttggaatgagtagcctcaatccaagatgactcctcaactagagatatttattagagctttgtcccggtttgtgaactcctattcgcacccgaatgccaccgggcattatgaacatgactgactaatttaccctagctttttaggatgggcatagtaagtctacgcgttacttccgaggctatatcttatatctcatgtgacgtttgggttgacggctaacttgaacgaagtatgctctgctggtcggggtctttttatccccagccgatcaccaactggagacgcaagtccacagtcggcttatccattgatttatccaccatcaaccctctgggttttgtctgctatgcgatatatacctccgcgtttctctactctcccgtcataagatcacagtatgcggcccgccaccctgcctcaatcgaacccaccgttcggttcaacgatttcgcatttgcggcacacgcggtggtcatgtgcatcataatgtactcgcagttctggcctttcatctggggcttccacgtttcccgcttccaaagagtcagttggttaatggctggaatattctgggggtgtgtcctgtctcctctggtggttatcgtggccgtgttggcacaaagtccggatggagggtacgatccttccacttgggcgtggattgacgtggtaggtgaaaaaatctacttttcttcaatgaactcaacggggaaactgtaaaacaaagctaatatccttctagatatactcgttttcgtacgtcaaactcctgatcaccattgtgaaatatatgccccaagtggcgttgaactacaaacgacaatctacagtaggctggaacattggaactatccttctggatatggctggtggtgtactttcaatgcttcaactggtgcttgactccagccttcaaagtgactggagcggtattaccggcaacccagtcaagctactgctgggcaacgttacaatcttcttcgatgcaatcttctgcatccagcactacgtcttataccgagatactcctgacctgaagagaacatctggtccgagcgagcaatcgcccctcttggatggacaagacgatactgtgggagatcgagtatgatacacagacatccatgagacgaactagtgaccttggggccggatttgagacattggggatatgtgtctatttttgtagaggcagtggagtctgatcttggatctttgagatattgtgggggcggaaatccggaccacacatctcagcccgatcttggtgatctgacgatttgggggcttggtataagccatgatttagatacatgataaaccgtcctatcatgaatgtggtgctatatatttcggatctgagacactatgccaaggaatattattattagacggaagatattcggtctcaccaccagcgtacaatgtacaacgtgtcattctggaagcattcaggtcgaaaccctcccagacaacgtgtcgcacaatacaatacatagttataattcacatagtgactgcataatagacccgaagccacagtgaggctcacgccgatcaaattgacaccgctcctcaatttgaacggcctccccgtatttggcccccaccgaatgatgtgagtggtcgaataaagggataagcacacatttatgaacattgaccaatcatgaaaaagaacacggtctatccaccagtgcaccaacggtgctagccgtcggtgtcgtgctaaaaaaggcttactatcgtagctgaagctgaactctagattctcagatttgacatgagctcattgcgatacctgggttgcatccggatcaaccatacaacatacagaactgccctagagtgactgatcagcaagatatcaaccctagctccctaccagtaagatacccctccacgcaagagatgctaccttcggctttgacgttaccttcaagctgactcaaccttcagaaacttgaattaaaattatggggttaaggagtcggaaattaataacgtgccatagaatcgggaattatgtgtataatcttaggcataatttgtgtagtggccatgacagtgaggctcttgatatctatgaggatgaaccatttccacgtgtttctagagaacatgcacaaaagacaagaaagatattacagaatactataacacgagttttggtgatccctagcatcctgggcgtcttgtggctttctattggccagtaatacgagcgcacaacgcagaccctagaaatatcatagttgattcatgaaaccctaatctctggcagaaacctgccggtcttggtctagccaatcttggtatgtatatgtgcagacccacggcgtcatctttcagccctactttgaaaaagcctgttgtcctatagttctgaaaatgagaagccaatacctgcaagccctgagtgggtcgaagatcatctctaagccggtagacccccccagccccagtaatccagccattctgaatcactttgagtcaaccccaagaatcaatgaaacggtatcaattgatcattcggtgcattgccaataataactggtacagttaacaattctatatcaagcatagcagtatgatcaagtttcaatttcttctgcggaacgcctagacgttcaggattacagcactgcctccttgacttgagatggccataaatactccactgcgagtttcttcttagtctagaagacaagttcagctctaaatcagcaaaaactctatgaaactttggcttctcagtcttatcgggcaaaaaaacccaagcgcatggacacttgttcatacatcctttatttatgagagcgaaatcatactaagcatccattgatatgcaagagcggcggcccccaaaacacagctttgcatacttagactgggaattctcttttctatcctcagaggaattacacaacatcacctacgtccccaacgtcaccgacatcgccaacatgtatcctagtcctcagaagtctaaaagtacatatagcactgtgccggatagtgctggctactcggagtcctcagagcctcaacgaattggaggcttggtcgatgtgcctacatccagctctcacatgtccgttcttcagcagatagactttatgaatgcccagccaaatcctcggtccttcttagctcctgggcatcattctaccgggagaagggaatcgatagacactggtacaattgggtctcaatatgcatggtccactgcgtctaacgcaggcgtcctctcaaactcttctcatatgccctcctttgagacctccatcgaccacaacacaacgcctttcattcaaggttactatccccaggaatctctacagctcgctatgagtggaccaggcgtgtcgggctatactcctcagcaaatcgacaaatggtgtgttgagagcgagccagcacaagacttctaccagccacaacccttccaaaacataggctctatgcgttttccaccatcaacagaagtgcaaccagagccgtatgcgacattcaacaaccaagtcaatactgcgaacgagcagtggctctcttgcccactccattcttctgatccgaccccagaaaccttcttccaaatcccccaatccgtctcaattcctcagtcaaatcagtcagtcccagcgccaacaacccacctctaccaatccactactacgaccacctcaatatcttcatcgccaccatgctccctctccgacccagattctccaccagccgcaccgggctcggcttccggcttaggctcgggctccaacgcaggcgatttaagcaactacggtattccaactggtgacggcacctggcgttgcgcccacccaggctgttcctcgcaggctgtcttccatcgaggctgtgatctgaggaagcacttcaaccgccaccgcaagtacctcttctgtcgctacgagggatgtccccagtctacaaagaatggctttagcagcaagaaggaccgtgctcgtcatgaagcgaagcataatcctggtgtcttttgtgagtgggagggctgtgggaaggttttcagtcgtgtcgacaatatgaaggaccatgtgaggaggattcatcggaaggggcaggctggaagggcttagtaatcggcgaggtcaccatgaagattatggtactttggttcatgtttacccggcggttttttttttgctattttgtttgattggttcatgtacaacattggtaggcaaagcgggaaaaggcatggcaaatttagacaatgaacggttctgtttagcgagggtttaccttgtccatgaaagtttaaacaaaaaccatacgaaaatgtatagttgcactgcttgaatgctagacctgcgtatgaggatgtagatatgcaagtctagaattagactcgagcattgccgagtattctaccgccgtaagaagcgactaaaaatgcttgattctaattttaacgccaaataacgccctaggccagactaatatcaccacctgataataggaatattgaaaaaaggcctgtgtaatcgaatacccgtgacccgtgatcatattatgcatccgagacgtttacgcagaaatagaccagatgaaacgcgcatttcccctagatctattaataatgcaagttactcatcaacaaacagtatgctatgtttaacctccatcatgcgagttcactgctacttagtggaggctatgtacagtggcggcaggcatagagtgaaaactaaacatgaatgcgggcattgttcgattgcattttctatctagggtatccaggtaagaatttctttcttatggtatgtatgtctcgaagctagtgcaatgatccaaattatagcctttctatatcaagaccagacgaggcgaggtgtacttcgtccattcagaacctattaaacccgcctccgcacgttggttgctgccaaataccatctaattagtaaaccatcaatcccaaagaatcgtcttctttggattcgccagctatgcaacttggataacgtggctagattcaaccagaccagggcctccgtaagaagaccaacccagccaggccccggcaacacacctgcacccgaaggatgttaggggaggctgacagcataattctgagtgatgtacttggtcttctaagggtgtgtttcatcaggtaatctgaaactttgggcaacccaaggttccaaggtttcagcttcgcacgtgttccaaggttggtcttggaagcttaactctatttgaaacgtgtatgaaccccagtagttcaggaacaaaagcatttattatagatctctgtctgtagccattgggctcgcacacatccatattttgtgtagatgctcctcagtcgaagacagacttctcgccgtgcgtgcaatatccttgggtgtaattctgcgaatttgtggtcccattaacgcacgaattccctggagtccaagatcccaaccaagcaggatttccagagacaggagcgcatatggtagtcttgtttgcagtatcaccactacgggactcatgaagccaccctgtaatgattgatcgaacaagccaataactattatctgcatgaccactgaacttggtcatgttgtaatgatcagcatcaatgccgcagctctcataaccccgcagaacagccgagtgctcttcaacgatcttgcccactatatcattcatatctttcgattcgtagaaacagaagaccttgagggagaggtcgccgcaatggagcatagactgaaactcgtttccaactcgttgtacgtcgttcgagcccgggtggagagccccgaccatgtctctgtttgcggtgtggactatgttcatcccttttgcgagtttctctcggtaagaagcgagcgaggacccgtactgcggtgtgcccatgaagattatcccgatggcgcttgaagatatcgcccatagtccgtctatgtagttgctgaggatcagggcttgttggcataccagaccgcccagactgtgcgcgataaataggatgggtctgcttgagcactcgattcgttggctgacaattgcataggctagggattggctatggtcgtgcagtcgatctgagaaggtaatcgaggaaaaactgaatatgtcgacgtcgtagccgaaggtcatgatgcgtgccttggacaagtccttggaaagaagatcccggggccataaggttccattttggtgagtccatgttttctcgcgatcgccggtcaatccatggataaaaacaatgctagtttagtggatgtcagttttcatttcttctttgttcatctaatttgggctccttcctggaaagatgaactcactctaggtcagcatctgaaggatcagataataccttcatcccaattgcaccttctgtggggtacctcgacattattagctcggtacctcgtttatctattacgaaatcttacagactgtattctggaacactgggtttcgtcttgctcctgaatagcgataacctcatggtggcgaattatatgtacccgaataaaacaaacaacataagatagcaagatagagtcaacagaagaggcaaacccggatggtaagagagttttaaaattcataatcctgtcggttaaaccacccctgtctggagctgatgacccactggattacacaatgtcttaagtaaacacatttcttaacaccgtctattttacgtccatattgaaatcattacaggtaacacagaaatatgccgattaagctggctgcgttttggctggctgcgaacacgaacctccatgagaataaatcgggccggaaggtcttggtagccccacaggatcgggcgcggaacttttatatcgtaaatggtggaatgaaccgtagatgcatgattgggctcgtctcaagcagggctgttaagataccctagacttaatcgggcattcccggccgcgtggaccaaccggcatattcgggcttctctgcgtttgcatttgagatggtagagagacttgggctctcatacttgaccgttctgatgattatcgctttattcgagaatctgcagccactgggacggatatatagactaattattggatgcttcttttatcaaaagttcgtagtcgtcaatttccaccttcccactttgagaattcggattgatgaaaattgctcttcttacacgtacaatcggcaagcgcactgcggccagcaagccatcaaaacctaagccgtgatgcagatgcagtgactatgcacctaatacagcggtgggtgggttcgattatggcgcaagtgatagacggaagaaaggccctaggcctggatcattgcgataccctagggaagcacaacttggtggctggggaactcttcgaaatggtgaggccatggaaccgatagaaaagtgcgtggaattgagggaggcgggttatagtccggcacccggacttgattgaaatcaccaccaggttgatcgaaggccagaaggttgaatctcaaagggaatatcagatcagattgaccatacgcgaatttgaagaaaagctggcaagaccaatatcaagttatggtgcatcgggaaagagacttctacccgagtgtgattttgaaaagtcccaagtaaagtgttcaacagagggttcatgataccccaatgaattgacaaagaagataaaatagtaaaaataggaaagactcacaatgctccaattaaacgaatggcccatgtaacatcatgaatttctaacaatggacaggtggtatcattgcagaagcaccaaacaaaagtacccaaaggtaacaaaataaaagacagcaaaaaggtatcacagctgagaaattcgtcacgcgtaaagttgcaaagttacctcaaagagggattagcatgtcgtactgaggcgctaatctggaaatctggaacacccggggaacacaggcatgaatgtgggagagagggggtgttggagagggtacacgccggtcggaacgagtgggatagaaagagcatggacacaatagaaatgagttggaaatgcaagatgtaaacaggaatagaatgaaaaaggataaagaataaacaagaggctaaaggttcatgtattgttcatccttcgttttctcccgcgggtgctaccaagcggccgttgcgcgagaacctgtcggagaatgggatcatctttgtttttgtcgacatgatgtacacgaacatgtctgtgtgagcgtgagttcagctgatatcagattaagtgaggctcggatgtagcacgaaccgttgaagattgtcgggtcgcgggtatttgtgttgctggtctggacagaagggacagacgtagcctggggagttgtgcacgaggccatggcgcatcatttcattcttacgcttgaaaccttttccgcctagtgcgcgtggacagccctctaccgggcagaagtgtgggcggtcttgtgagtgcacgtttgcatgagagctgctatttcgttaggtgggggtttcacttgagtcgtctctttggtcttacttgaggagatattgagtttggaagggtgcagcagtgcagccagaatgtgtacacctgtaactacccagggggccattggcctggggagtggacgcagcaagcgaatgccgatcacccatactagcgccaacctgttccgtgggtgtagggtaactggtcgctggattctgggcagtcataggggaagcgtcgtacggagtctggacagacagcatctcagaatgtggtggtccgcgccagaaggacgagtgcgaggccggagaagggttggtaggtgagtccttcatgctcaccggcgagaagtgagaaaatggacttgcaggaatggaaaactttcctggaaaagtgcggtcgaatggagaatcatttcccgatgtacttgatccgggacaggaggagaaggggaagggcgatgacattgtgttgactgttggggcgccgaagtctgacaatgcgctgagagctttgtgaattgacggcagcgtttgtttattgctgtctggagactttgcaagacacgatccagaagatgattggatcaattttaatgatgggaggggaatttggggctctctttccggaggagttttgagatggggcaacacttgttggggtcgttgaaccgagccacttaatgattgaagtcgctctcttggtacaaactcatctttcaccttattatctggttgtataggcttgaatgggagcgatctcctccgggggggtttactcttatgtgaggccgagcccgagactggtcccggggctgccttgagttccggttttgattggccctcctttgcggacgaatttaacctctttgaatctctgggatcaaagtcaggcggctgtttatgattttttagattcccgggtaatggttccaatggagaaatccttgccgccgcggcaatctcagggtggtgcggagctagatactccatcagcactcggtcgccctcacgggttgagttctgaggtttcagctggttgggcttacgagaaccctctgcgtcggcttctttttcgctcgcggaaacaaatggtggtagtgtttcgctttctccatagttgggtttcatcgcccccccacgggnnnnnnnnnnnnnnnnnnnnnnnnnnnnnnnnnnnnnnnnnnnnnnnnnnnnnnnnnnnnnnnnnnnnnnnnnnnnnnnnnnnnnnnnnnnnnnnnnnnnnnnnnnnnnnnnnnnnnnnnnnnnnnnnnnnnnnnnnnnnnnnnnnnnnnnnnnnnnnnnnnnnnnnnnnnnnnnnnnnnnnnnnnnnnnnnnnnnnnnnnnnnnnnnnnnnnnnnnnnnnnnnnnnnnnnnnnnnnnnnnnnnnnnnnnnnnnnnnnnnnnnnnnnnnnnnnnnnnngcctcgccccgaggggaggggaccgattaaaagcatcatccgaatcatacatagcggatgtcataaagaaagtggcaggtgcatcgggcacctcgccttatacttggtgttggtctgactgattgaattgacgatcacacatcaataagtctgtaagatatggttagagaggggctgtaattgtgacttggtgatcggatgaatgagaagcacgagctaagtgcatacaatagaaaagcagaaaagcaagtaatgccgacaaagactgtccgtggttaaagtgttgagatgaggagatgaggggttgtcaggtcaggatgacccggagagaataaaacgaacaccagtcggaaaccaaagagacaagaaaatagggaaagtaggaaacgcaagaaaaacagaaaagaaaaaagaaacgagaccccgaagctctagactactcagtttcgaggtctgcagaaagtgcacttacccaagcggaaaggtggacgggtagtgaatgggtcccgggatgaggcttaaaagctccgattgtcactgcgccatctgcagatgaatatccctcggaaagaagcttgcaggttggaaactgtacaggaactcttgcaagggaagaaaggaaaactaagggagaagttgtaggcttcggggaaaaaaaagagaaacgagtctaagggtgagataataccacgttctacacgtgcaagttagggcccagcaatatctaccagtataatgccagtaatccgacggccaaaccagaaagaaagaaaaaaagcgtcaaccgagaaaaggagaatcaacgtccaaggaatattcgaggggggttgggagagaagacaataataatgcggctctcgctctcaactcggagctccacagaggaatagattacccgttacgttaccgtgactggtatttaccgggtttcgatttgattattcgggtattctatttcccgaggtttgtatttttgcgtctggtatttttctggtatttttcgagtatttccgtatttccatgatttcccttctcatctctcgatatcttcacttttcaacttcctctcggattccctgaatagtctccatccctcgatccggagcatttgaacttggtcgcacatacaacataagccaagggaaaaaaaggaaagaaatgatttctccaccgctactctctctattcaggctccaccagtaaacttggagacaacaaccggggtgcaactctcaagtcgtttcccctctatctctctccactcccaagtctgttatacccggctagggaacctgcacgaagaggggggcccacacggtctgttcacttttctcccatttcctatttcctctttcctctttcctctttccgtcccgccttttggtcctttttttacctttgcaacgtcagactcactgcgctggcacgctaacacctgggagcctcgagccgtcagcccgaaggatcttcaggctgtcccggttggattgtcaacgcgctgtctgcggtaaggagatcgtccagcccacgttgtttcagagcctcgttaagagacaatctttctatactactagtatagttcgatgatcccacatggtacattctacatggtgtataatacccctaactataatccacgtaactgtaatactacgctataccacctgcatacatagatgtgctgtccaaccccagtcggccacactccgaaacccctaattcccgaattcccttaattatcccagccgcatcccctcacactagtggattgtggataatcgagaatagattagttaatttgaaaccgatgcctatctgaatacctaaccctatcccaaacctgctattgaatcatgtttccttggaagtctaagaaaaaaataagaagtggagttcttcactccctcagcctcacttacacgtagagccgcagggcagataaaaaaagcctcacttttttcgctcctttgcatccaatcataatccattgaccacttgtctgcccgcagatgagctcaacggacattacacgatgcggtattccaccggtgtactttgcttctttcttttacgttacttgtacttctgtcttacaatcttttaatatacgtactttgtattttggtcttttctttttttacccgactcattacttgtatatctctaccgttttacggagtactcaatcccgctcggtagtgtgatcggatgagatggcgtacattaaacgtgatatcctcgcaggatattataccatacgttctcgaacgttggtccccatcgggataagtgcttacgtccacacgtcaggcgcgccaaaagtacttgactctagctgttctgggcttgtactccgtattcggtacataacctccatgcacacacccatagagtggggttttgattgtttcatggagagttggttctggaccagccttacattctaataagctgaagaatccgatttagattcagatcggctcatctcaacctacatgtagacggcgctagaatggaataagtgaagtccaggcctcgattctgagtatatacaatgccaaacctaaaaccatcaaaagcttccccgcaagtagtcaaatctctacagagtgtaagaagactacaattttccagcagaagccctcttcacaagctgaaccctctcccaagccccctcagcaaacggttttgccctcttcgcgtaatcactagccctcgcactactagcttgtctcccagcgaaccgggccgcaatgccctgcataatcacggatcctcggaacgcaaaaaatgcatcgccccacgccacgtccgagctcgtttcgtacccagacgtctcggcgtaccagccaatgcactcctcgcgccgtggcagccctggaacaacccccggcgcgaactgcgacagttggctgtccccaccgtcgattatgtaggggcttgtgaggttgcagaagtctgacagggggtgtcctacggtcgccatttcccaatctaggatgccgatcacgcgcggctccgtcttgtggaagatcatgttgtcaattttgtagtcgccatgcacgagggtgccccggtccagtggttgcgtgctcttttgcgagaagaacttcaccatgtcgtcgaagtgagggagttcaccgacgggttttttggtgtcggcatcgacgactgctgcttgtgctttggagatcgtcttaaaagtggcgatttggcggtcaaaaaagcctgtcggcttgccgaacgtttcgagtccgacgcttttagggactacgctgtggaactttgcgagcgtttgtactgcattcttccagctgcatgcttgttagtattgcgcagtcactgggggtttttggtgtcagcgttggagcctccatcgcgacgtacagtgctttcctctcctccccgcttatacctggcatcgctgggtcggtgaaatgccgcccgtctaggaattccatgatgtagaatgcggttccaatcacgctgtcatcttcgcacaggcagtacgccctgggaacaggtacatcggtatcccacaatgcccggataatcttatactcgcgctcaaccttatgagccgtctttgaaagcagcttgccaggaggcttcttgcgcagaacgacctgcctgccatcagcggcagtaagaaggtaggtaggattcgattgaccgaagccgaactatcgtgacaaaatattagttcgtccgtttgatattgctcatttggtgattgacggggccagactcacctgcttcacatcaagtggagtcttgacctctggaacatgttggtcaatgtacttctccaacgaggggatatctataggctggcgcacttctcccgcccttatgtcgatataaaatgnnnnnnnnnnnnnnnnnnnnnnnnnnnnnnnnnnnnnnnnnnnnnnnnnnnnnnnnnnnnnnnnnnnnnnnnnnnnnnnnnnnnnnnnnnnnnnnnnnnnnnnnnnnnnnnnnnnnnnnnnnnnnnnnnnnnnnnnnnnnnnnnnnnnnnnnnnnnnnnnnnnnnnnnnnnnnnnnnnnnnnnnnnnnnnnnnnnnnnnnnnnnnnnnnnnnnnnnnnnnnnnnnnnnnnnnnnnnnnnnnngatatctagaggctggcccccttctcccgccattatgtcgatataaaatgaggaaaggactgtgcgaaaagattgtggagaaagcgtatatatttggcaaggtgactgactgtttaaagagtaatatgtacagccaagccataaatgccggggcacctcctcggcgtgaccgggggacctcggccccagcatttcctcggcgtcaccgctcgaggggggagcggggagaaaaaacaaacagaacaaacactcggcgcgtcccagcggtgagacgcgcagaaaggcgtcgagcgtggagctcaccgcaatttttatcaagctaggggcgctttatcaattgcgttagccaactcactgcgggtccctgttatttttaccacagctctatccactcaattctcgatcttcgatcctctaaccattttgtgtctaccatgaccaaagagaccaccccgccacttcaagagaaatccctcccggcgcacaatccgccttccctgcctacctccccgctaccgaaacgatcaaagcccgacacaatgaccaccgctgctgtcacctcgatccagcagccgctgcccccgctgcttgttaagaagctcgttgagtctgcccaggctccaacacgcggctcggcttttgctgcggggtacgatatctacgctgcaaaggagactgtcatccccgctaagggcaagggcgccgttgacactggtattgctattgctgtacccgagggaacttgtatgtgacacctgtgatggggattgagattgagaaatttggcggagctctcagcttgttgaggctgagttgggttaagagtcatactaatgacgaatacagatggccgcattgctccccgtagcggccttgctgctaagcacttcattgacaccggtgctggtgtcattgatgccgactaccgcggtgaggtcaaggtgcttttgttcaaccactctgacgtcgacttcccagtcaaggcgggtgatcgcgttgcccagctggttctggagcgggtgagttccggctatcaatactgtatgttgtgaatgtgtctgacctgttttagatctacacccctgaagtgagcgttgtcgaggagctggaggagagtgttcgtggtgctggtggctttggtagcactggtatttaagggtcatacctcggtacataattggaaggacagacaaaattagataggttctaggtttgaaaagaacctagttacgattatatgcattttgagatcttgtttgactgaatgaacgaaagatacaaaaaaaagtccatgcttgattcaataatcaaatctatgtccacaccgaatttttgatatagagaggggccatcgacccggcttcatccaatgccctcccgaaatccttctatcatctagccatgccatatgcaaaagatataaaaccaaagactatcgcagctcctcgggaagatccgccttcttccaatcctgcaccttgaaaataatcttcggatcccgcaaaaaccgcgtattccgcacgagtctaacctcagcagccttagtcttgcgcaagtaatctctcttctccaattcctccgccgagacctctccttccagcgcaggcgcaggaaccgccagctccgcatcacgactctccagcgtccgctccaaaacactatgcatactcgacagaaccttgacagtcgcgctggccaacggcaaatccgtagccacgacatcgtcgggcgaaacccacgacttggtcgtgcgtagcccatccactgcagaaacggcctcgcttaggcgcgcgacggtcaacgccgcgaacatgtcgcccgtcccgctgaagaagcagttcagcgctggaatgtcgacacggaatagtcgcggggacccatcggagcgcgtggttgagccaattactgttaggaagttctctggcggggatggggttgagcctgattgggagagcttgaagagctgcactgaggtgactatcacgtgtggaacggagtagatcctgtgaatggctgtcaccgctgaagcgagagtggctaatgaagttattttgatgccggagagagtcctgtattatttttatattagtggttatgtctgggtatgaagtctgggttgcttactcggcttcgaactggttgggcaaaatgagatccgcaaaggggatgattttcttgtatgcggggactacgtcgtcgttgacatatagccggccttggtcgcccatgactggatccaggactgacattatatcagcatctgtacttgggaggaatggagagtctttactgaccccagaaaaatgacccgggcttcttctccgccttcttttgcaggtcaatgccgatagcgcctactgtttccacggctgctgcactcggggcgtagcccgatagcatgacatcgaagtctgtgaggttactctggcataggccctggtagagatctgaaatttcctgcgcggtggcacgagttcccttaaattggcggtagcctgtgtggttacctgcaattgcatgtgagtctgggttgagtgttcactgttaagaccgggttgcaacgtactgaagtggacggtgtttatggcggctacttcgcagcccagagattgcatgacgaaggttgccattgtgtttccaacatggctagagaagatgttagttgcttcactccaaggatgtcttctagatataatgatctgcgttatcggactcgaaacttacccataaactacctgattgagtgtcagttttatcacccgagggactgggcagtttcacttacatggctggcaacagccagaaccctggtctctggtactaatgaatccatgataagtctaagatcaagcagttgaattgaaagagagagtctatcaagtatgttcaatgttgctatgactctgtgtggggttcggggggggaaatgatttgccgaaattcctcttacctaattggccccaagaaccgagtttgttatcagtaaagaaataattccatgttcaattggagttagtgctaattgaatgtagtatactccgtagacatagatgtagaactgtagaatcaatcaagttaaaatctttcaatatttggaatgtgagaaccttacaggatctgatctccttccgtcaatagagaattagaaaagacaaacggtgtctgtcatttaggaagtgtggttcgggtatttaaagatatctcattgagaatagagaaatgttaccctgcactactcagcaggagcataattgaagaaccaaacagtgagaaaatgtagctgctctactgcttacgtaccgatggcaactgcatctcatctcacattgcaccgatgtctccgtatacttctcctaataaaaggccttaggctttccagaaggacgtaggggctctgctgagcgtctttgcggctcaaatagtgagactgtagcagtcgctgggttcgtactaagtatttctagacaacataggcagaatttgaaaaatggtaggccaactgaatagcctcgatttttttcacttagggatttcatttagaggagatcgagaccgttagtatgaatcgtcatgttaacgacgctagtcctttttgataggacgatgggcgatctgaatggttaactaactagttatccggttagttaacgtgtctattgagcgggaagagctgactcaacatctgttacactttcgctagtaaaataccttcatacctacatacatatataagtactatgtaggtactctgtggaccggataaggaatgtcaaacctcgtctatacctgaaaggcggtcagtgaggcagtgcgaagaaacggagatatctaaatccggcccgtctcgacctcgtatacatctcataaccacaaattcgcgccatgcaagccttaaggaaagccttctgatttatacttgcttcgcttcgcttcgcaataatcgtctgaatttctgtctcggcccccttgcacaatttatagttagttatggggccaggattacataaactaattacgaaacacatgagattaattgatcctccggtatgccggtccatatgctccgacatatgacgatcccaggttttcccactgcactagttatattgcaaccactcgcatccctgggcctttcatgaacaattgtctatccaagaagcactcgaccagagcttcctctccaccatcacaattacaggatttaatagcagccctgatgccaccatgtgtagctatcacatgacccggctgcccctcatagctagaaatacagcacattctctttccctcagctactaactacgtaagtataacacctggagtgctttgtgagtgcccactaagcgttaattagcgggacctcgggatccctatgtgatagctctacgaaaatttacttactccgtagagcctgactctgagcttataaaagggcagctaaggtaatagggaagcgccactagggaaataagtgaggtaatagatctactctataactaactgactataacgacacatacatactcaacttttactcaatatagcacagatatgatcccctgaagccaactgagttcaatcgaacggtctaggtcgtgctagtggtactccggagttctgttagcgcattggcaagttctcgtccaatccgaaggccttggaactaaaaaaggcccattttaggcttttctgcaacttccagggttaacggcgacttgcgcttctcaacttcaacttcaccaactcatcttcaagatcgtccagggacttttccctcagtcactccttctgaagaaccgattatcgtcattcattcccgaaacataatgttggattaaacacttctttgtttcccaactgtcattaacatacaaagactgtcctttctcctaataattcatacttgactatttatgtcctcgcctcgatttcaagtcgacgacaatacgtcaaaatgtccggtctttaccatatctacaacctcctaatcctaattactattctctgtctatcacccacatgggcccaatcagtggagcccaccgacctgaccgtgccacgatccgcctggcacgcaagtggagagatcacagaccgtcgatcactacaagaacccgcagaggaaaccacaacagtgcgccgacgaacaatcataacagcatcaaattccacttcgacaggaatgcccaagccgttcgacacactctcctacaacttcgccaacgcaaccacctgcatcgacttcttcgcgaaatggcgtgccaacacgacaatctccaattgcaacgccatctccctcctcatcgagaactcaaatgccttcttccacacccttaattcagcctccgccacctcccgcatcctggaaacctcctgctcggcaaatgtctccaagtgcgcatccatcatgaccgctctcgcggccgatctactcaaacccgccaactgcggtgacgactatgataacgataactccgtcgtcaagggcacgtatcgcgacctcgtcgcatacgaaccaatataccgcaccacctgtcttacaaacccatcgacccagaactactgcttcgtcgacgcagtgtcgaattcaaaaaacccagatgactacaacgtgtaccttatgccgctgggtacccctctcactgtcggggatgtgccaacttgtaataagtgcttgaaaacaactatggatgtcttttcgaaatgggcgagacgggacggccagtctcttgattcgacctatctcccctcggcgaagattatcaatgcacactgtggtgatggctttgcattaactaatatcactgtgggctcggtggatgtcagggctggggcggctcttactgctcccttgcccaatcttggaattgccactctcgtggctttagttcttggtgtcatggcaggcctgttttgatctaaaatatttatgccggtttttcttgtccatatctacacttttttttcttgtttatcttttggggtccgtctgcccgggtgggtatggccatggttgatgtcagcgagcgtgctttttgctttctgatttgaccgtctgatttgtacgtaatttctagtgatattgtccatattgctctcactctgttattttcttattctttccgtatacgatagggttgaatcgatttaacatttgcagttcgctaatgccaaaaatgtccgggtgaataatatattcctcaaacgccagtggcaagcatgtccacaaccacgtataaatagacacaatataaacaaaaaaaaaatcgcatctgacatcattggttcgagtgcacatagttcgtgatgtaagaaaaatctggcaaaggtagccaacaaaacaacaaagcaaaaacgctcactgacataagaatgttattttaaaaaaccaacacgaacctcatcagcttctcctcttcaaccctcctcccatagcaacaccaacaaggctctgcggctcacctccaaagctagcccctagactcataggaaccggcgatccgccaccagaaataggactctgtgtagcggcatctcgttcccgcttgacacgtataaagcccagtttggcgaagcggccaacatgcgtccaaaagtgacgcccggctgggtgtgcggcgatgcgctcgagaagatcggctgtcgcttcgcggacaacctggtccggatggaacagacccatgctgacatagaagagaccggcctggttttccggtgcgatggttaggagctggcagataccagcgtagtccttgacggattgggagagggcgaggtagatggaggcggcttcagagtgggagagttttagagtgcgaagacggtcgtggtggtgatggatgtctgggcgttggattgggcgcgcggggaagtacattgctgcgatatcttggatgtaggagtagtaggagcgagtgttgcgccagccttcgattcgggagacggaggctgagagctcgcgctgcttggcggcttcgtctctccatacatacccgtgcccgcggagagttgttgggtctgaggcgtcggtttgatggcctgtcgggctgtccggagagagttcttcgcctgggccgatgatgtagagatttgaggcgccgtagactgcttcttcgaaggctgcggcgacgcggacgaattttgttatgtaggctcgccattttgcgcggacggcattctcgccgtggcgttggctgatgctgcggaggatatcttctatgaataatgtgtcgcccgttgggtcttgggttgtgtgggatgaactgctaggtagaagggaattctgctgctggaagaatagaagcccttccgttaccggtgcaggttcaacgtgactcgagatcttgatgcgacccgtggggaggtcgcacataacgtcccaccattcaggatggttggcaaaagtagggtttgtgacacctgcaataaaaccaggtaccttgaggagatcgtcgatcttggaaagatcagtataagggaatgcgtgtcgagtatacccacgtagaatgccaccggacgcaagagcgcaggccgccagaaccgcctctgcaacttctcccgatggccggttatgtcctagaaatacgacacgcttctgagtgagaatggcgttgacaagaacaatcacggggtgtgtgaatggcccgctcgttgtcaaatggggatgcgctgggaaagcctgcggggaattggcatgcggcacagcgaacgtttgaatgagcttgatgagggaaaagtctccaacagtctccggccaaatcactgtcggaattttgactgggatgggtatgtcattgtagactactttcgactcgtactcatgtgtatcccgcggtaggacatatcggctcactttcttcggtgacggtggacattccccatcccggagttcttcttcttctcgctggcggatcatttgttcgaatttctccaggaacatatcctttgagttgctagattgcaagatatgacgctcaagaatcgacattttcggcattaacgaaaggtccatggcattaacagcgtcatagagggatgccagagtctcggggaacggagatttgaagtagtcctccagcgctaggagtagtaaaggctgtataatggttagggtcaggcgggtgctagtgccaggagtagcttactttgtaaatgtggaggaacgaatgtcgcgtacagattgccattgccttgactacggcgcctctgttcgctattaatactcgtacattgagacaagacagtacgagtaggtacaacttaccttcggacggtattatcctgctttgtattgacaagattcagcacatacatcaagggtggcccttcaccaccctcatcatcgctgctgtcggggtcatcggagatctcgtccaggttctcgtcctgaatatcggctccctcgtggcttccatgatattgtgatttccgttttttcttcttctttgcacccgacgaatccgtttcttcgtcgccattactgtctttgtgtaagaagaacatggtccagtcttgactccgcacatgcgtctgatccggcagcatcagctctgcaagcatgctttcatccccactgattgcagcgggatactgatgctccatgatcggcccccgatcaatatggaaggatgcaactaggatgtattccacatggcgctccggcgagtcgagtgggtactgcgctttgcagcggcgtggcctgaagcttgaggccgcattccctgtggatgttctccgaaaagaaccgtgcgagctgctgggcgagcgtccgataaaggagaccgcaggcgagagccgaggaacaccacttgtttggcggttattcgaggcggagagggagtcgttcgacggtcgatatggtattgttgttgccatcttctgggggtgttgtggatagaggattactccgggctaagctataaatcgaatagcatacctgggggcacagaaagcaccagatcaacggccaatgataataatagttgaattaattgtctcgaattagctgttcaggggttaagaggggttaagaaaaaggacggtctctccacagtggagagacgataagagcgataagggggggatccataacattcaaaggttgaacatcgaggaagatgatctatcagaatgcaatctgtcttttctttttggaccgtacattgtagatctttctatttatattacagcaaaattgaggcatcatatattgcatttttatggagtatgaagtaaaaaatctgcgaacaaaacaaaacactgtccacttctaggcattttacctgatatagaatagaaaggcaacattgtgctacagaacacttggatgtaccttataggtatacccaaagaacagttaattatatgaattaccttccatttatcttactttctatatttagacccttggaagccaattgatggttgatgtaacgagtacgattccttatagatctaactataaacacttcaaagttacataactatacaacacctagtcagccagatcctgtttctttcttttttccttcaaaatatagaacttatattatactctccttagcaaggtgaaattacaagcattaaagccagacaaggatcgtacaatatacaatagagggtcaaaagtgtgttcatatagatagggcggtgagaaagacggtggcaaaattatgttgttgtgccgggactttgtttacatcgataagcaagccttcgtcataggctgtttacaattcatatttcagctcacacgcgaattttaccatggtaactaaggatcctgagggatgatataactattaaaaactaatcaacaatgacccaggccaacaatcccacattcaaaccatcgccgttatcctttgggtcgccgagggcatccccgttccggcgcccatccactccaaattccccgccttcggccagtcgcacaggaggcaccccggggagctctcccagtcgggcatatacacctatggtatctcctagcaagctcaatcaatcatatacagtggaggatggtgaatcgcgttctccgaagaacgagcggcccattccccagccgaattttgccagagagttctctccttccccaacgaaaggaggaaagtcgccaggcagcttatccccaatccatgggtcaaggacgggtggagttgcaagcccagctggcgacgcggctgggaagctgccagcgcaacaagtgagggagatcagagaagctttccaggttctcgatagggataacgacgggcttgtggacaaagatgatgtgattgatgtgctgacaactttgggtaggagaaaatctacctatattttttggaaattcggacgagggactaatccgagtatctgaacaggccaagactcgtcatcctctacgctctcgcgcttctttccaccaggagcaggcaatactatgaattttccaaccttcttgaataccctttctgggctcatggcatcgatgtcaccttcacaagagcttctcaacgctcttgctgcgtttgatgatgatgacagcgggcaaatcgatgccacggaattacgtgatgctctcctacatacctccccagaagatggagaggaaagattgactgagagacagatcgatgaagtcttcagtgggtttatagggcgcccagcatttattggtcggggagcgaagtcaggcgggatgggtaagaggggtgaggttttccagtatcacgacttcgtgcgcagcatcatgggtggggataatggaaatagtgccaagaatgaaggagatgcacatgtatgaactgctattatgaaatatgggtttcaattgagttggcgttacggggtcgcgtcttataatgttggcagtttgcagattccaagtctgtagaagcaggggtcagactatacaaagcttgtcaagaatgattatgtaccattacttgttcaattaccaatgattttcggtaactaaaagcagtgaattaagtaaatagaagtatacgaagccaacgccttccgcatcggcagaaaaacatccagccaccgcgatcagatacactccacctcgtcaactgcactcatcttaccccgtttcctaggatgtccgctcgtgaacatcaaatgcagacttgaattcagaaaaatggccaaacctcagcccccctgggctcttggcatcccgggccccgacgcacccccatcgccgcgaaccatgcgaaccctccgaaagatccaatctcaccaagtgctgtcaacatctagcgcgctcattgcccagacccaggcgtctcaacaaactggctcccatgaatctcaacctggatcaacagcaactcctggtgctgcgacccgagcgcgcgcacatcgccgagctcgatcaaatagcgacgcggcttctcgtgaagctgcggcaacaccacctgcgactcagagacgacccccgcggaaaacagggtcgggaattggaataaagcgatcgcttctagagagctttttgcgcgatggaccgcagagttcaaatcccaacgagggactgagagagctcaaatacctcgtcctatccagcagagtggatgctgacggagatggcatggtgaggggtacagtctgctttgcaaaattaatgtctaacacttcgcaataatagtcgccgtaccggatctacctctggttggtcctcctcgacattcctcctatgcccaccgatgaataccttgatcttatccaccgcgggcgttctcccgcttacgccaaaattcgcaatgatactttccgcacactagccacagaccctctcttcaaacgccgagtgacggaggcaagcttgattcgactcctcaacgccgtggcatggaaactccacgattccaggccgaaacctcggtctcgaccgacgtcatctcggcgccgtgagatggagcttctagtgaatgcaccccctagtattgcagaagagtctccctttgggggagagttggagaagatcactaatagtactacaagtgattcagccgtgtacgtccaaggcatgaatgtcttgtgtgcgccgttcctctatgctgcccgtagcgaggtggaagcattcgctctgttccattacttcgtcacacgtgaatgtccaggctatgtccgtagcgctatggatggagtccacaagggccttcgtttggtcgaccgatgtcttgagattgtggagccgaagcttgcagcatatctgttctccaaggggatgcacgccgaactgtacgcattcccatcagtattgaccctctgcgcttgcacgcctccattgccagaggtgttacatctttgggatttcttattcgcatatggggcacacctgaacattctgtgcattgtcgcccagctaatccgtatgcgagacctaattttggagagtccgaggtaagtcgaaggctgtcctttgaatgtatctgaccatagctgacttgaggatagcccaaacaaaatcctccgctcattccctcccctcaatgcaaaggagatcattgcgttgacggttctccttgtccgtaagatcccagaaaacctttatgcagagatgattagccatgcaaaatagacatggctagacctaattgagagagcccgaggtaaattccagcctgatgaggagctctgaccgaaagaaagattttactacctggggtttgttttcggatcggcgtttttgatatgattgaccgcaacgattgcgtctggtgactggatgggatgagacttacattaacgaacaccaaagataacacgcttgcttgaatgaactaatgattgtaccagtatttgctagtttttgagaatccatttgagatgagacatgattctcccttttagaattcagatgttttactcttatggaccatgcttccctgttcgtttgtcaaaggatgaaaccctacttttcctcagttctcttgagacataacaaacattgtttgccacaagacaagaagagatgattgcgaaagcagcaagacatcttcattaacgcaatctgcatgatttaggcgcctttcatcgtctgcgctataagtactaagtaccctttacttgacccctctttcttcgccccatcattacccagagaaatcaatgtcgtccgttctaataacatctatcgtcctggccgtatgccttgtcctgattctgatatggagcaacaggcgcgaaaccaatttcgcatcgaatgacccagcgatatgccgcagaatcattgccggcgtgttgaaacacaaagaccaaccgaataacctatcaccacaccaagcgaaagcaatttccaacaaacatctcccagtcgccttcggaatcgacaacgccttcacccgaacagagcgtgcgcatgccgacatgttcgtcgagaaagtgaaacggctgatcaatatatcgacggagcagtggtacggcgtatccgagttcgctagagtcactaccagccactggatcgagcatggcttccccgggatgaatcatagctgcggcaacagcggtcacaaaggaaagaatgatgtgaagttcaccaccggccgtaatcggatcaacgtcgccagtctagcacaaatactttcattgaaagttgtgctatggctgatgttcgacaaaaagactcaagacgaaacaggccacgagaatctactgaacctagcggagtccatcaatcgagtttggatatcttccaagctgaaagccacggagaacgatattcccagatacgaagacgacgtgttgcttcaaacgtcgctggtcaatatcttcgggcaacacgatcgcccagaagacaacccattgaatctcatcctgccttcatttgagacgatgtggcgcatcgtcttgcgaggattcctagagaccagattcgcgtctggaaaagaagaacctttgtggcgggagacaatgattgcatttgccatgaatcccacaaaatcccaattcgacgggcccccgtccactcgtcccaagtctgaatctagggttaatcccagcataggcgatacacatgctattcaaagttcaccctgcgcaaaacacatagttcgggaatcgcttcggctgtatgtgcccacgagacacatacatcgagcatatcagtggcaaccgggtatggggacttctcatgaaatcaggtccgctgatatcgaggggtgtcatctgaggtccgatatctggggttctgatgcagagcgatttaacccagatcggtggtcgtttctgacgccggcgcagggagacgcttttatgccttttggatctgcgccctttgaatgtcctgccaagccgactttcgggccaaggatggtcggggtcttggttggttctttgttggcggctttggaggataaggagcatccgaggacttggattttggattgtgaagatgggaaggtgttggagcacgtcacttctgggaagaggttgtgtccgcataggaattcctatacggatttatatctagtgcggtctacggaatagagaatagtgaacagtgaacagagatatctatggaatatctttcgaacacatatccttatgtataagtaaagcaagcggatgtatgggaggtcggagctgggatttatagtcaaaaaaatgtaaacgcctaggaatcacagaataatttacgtcaccaagaaagaccactaccaacagccaataaagcacagcacgaacgaaacttatgtatgttgatatcgaccacacccgcctcgaatattacatagctctatcacgtaggcgcagatattggtgaaatctcaaccgactttttcaacccagacccatctatcaccagaggcttagaaacaccaacagcattggcttctgcggtcatctcatcagcccatgactgacacatatccctattgccaggtaccgaggctgtggtgtctgagccagcaacacctaacattccgtcgacttttacggcccgcgtgagacgagagccacgatcaagcttcaccctgatccgtgacccaaagaaactcaaattgttgaacatggtcacagcgcactgggcttcgtctgctgttcgcatggtaaccaagccgcggagccggccattgaagtcggccgagtccatggtgattattctgcatttctggacagcaccggctgcttgaagaaggattttcagatcggtgcaagtagtagccggattcaagttctcgattatgatggctcgtcggtctgaatagatgaatggagagccaaggtttgtgcctttggcgcgtgattcgcgatggtggtagttctggtggttctgtgattgattgtcgctctggtggtgcatgtgttgtggaggcgacatctgataacctggcatcatgttccaatatggctcgtacattgggccgttcattactggggatggggggaaacactgcatcggtggtgcgtgtgaatctggcatcatagtcatgaatccttggggtggcattggtatgggtaccatcatgacgccatactctgagtatgagtatggtggagtggcggggtgcgaggatctggggaggaagattagctttcatattttatacttgaggatatagactcactctggcgagacgggtgaagggggcattgccatgtttccatgtactgatggaggtgtggagtggccagagatatagcccgtggacatcattgctggacttctggtaggcccggcaatgggcttggtgggcgtactggtccgcgaaagtgtgacgaccaggctctgaccctcccatccgctggtcgaaagtcgatctgtgttgttgttagggcggatcattggggattgcgggatagacacgtacggtacgttcgccaggcctcgtcttcattcttgacgatgatctggccgagtccggtggggaatccatggctatcatcgtatactactgcctggcgaatatgcaatgcagtttggcggacgagatctttgagttcttgccagcggcaatgaggtggaatctggaattcttgtcagtacttgaacgcatttgacatagatatcaaactcacgccttgaaggaatacgacaaactcatcatccgacctgcgcgatctgggatggtatttatcacgaccgagaagaggcatggctgcagatactccgagacaacacaccccggtatttcagtgccgaaagcgtactagctcagacgtacggattgaaatggcggatagaattcggtccgtcggtgttgcgaaatagtcgaggctcgacttgtccgaccaggtgtttggttgagtatagaacttggacaattgggctttctgtcagagggctatgttagcttagggtatataaatatgatacccgggacgactacaggaacgacatcacaaagcatcaaggtgtaaccagggtgcaatacctgggaacaaatggcacacacctgccttttttttttctcttcctgtcggataaatgcaagtcaacgtattggtctgaccgacaactgcagggaaaagagataaacccctccacgagctggacgaaggtcgagcagattataaagccctggaacaaaaaggaagagaagtcgatgtttcacaagaacagttaggatgatatatgatagattcaattaaattcttactagtattaatctacgatagtctcatgagcttacaagtagaaatcacgggggacccagaatactgcacaatctggacgaatggcgacaccagtcgatcagcagtagccagtcatatcagagaacaagcagttccctttctctttccaactgagatctgtcattttcaccatgagttcagctctgccaaatattagaatacaatagagtggctctgccgtcccacctcccgggtatagtcccacttagtcaaggcctatcaggggccctaacatgtaatatgccccctctttctttgctatccatatttaaataatcatctcgatcacgtaccggggtatatccacagaggcaaatcactccgtaagctgtgcttacttgacttagggaggatgtagtgttacaccgctagatccggatcggacatgcggagtggccatgctagtggacatgcatagtggacctgtattcatcacattggcttctgtgtctaatgtcagatcggaaaccctggaaaaaaagcaaaaacagcaaaggatgggcaggaatgaaagaaaaaagaaatggttttatgaaagggagatcagtcatatcttgcagatattggtttttctttttttggatcaattacattgactattgatttataggcgtagctcgctaagtacctgcagataaaatatagatggaattattgaaggataactccggctcaaattattgccctaaattctcatgtggacagacaccgccgcaagtcgtcgtcgggtattgaatatgtactcgtccttaggatatggagaaccaagtgtcttacagatcttcagatagatctctgtgttccctttgaccaaggccgataactacaatagacatgccgcaggacatgtgcgactgttaaaagtatatcaagacaaatgaccatccgcacagctacggacatcctaagtatttgtactatgacgatacgccaccaaggcactgggctccaggggagatcacatggccatggtctctacacatatctacggcctcttttattgatggattgtggcagagaatcttctttggattatgttcagttcttatgttaattaaattatccttccacgggcgggtgattccctgctaaatgcagatgattacactctattacggacatgattagcctgcaaatggtactatttatataacaagcctatgtataggcaagggatcgtgtttagttatgtttcaattcaaatagaaggataaagtaaattaatctaattcgatgttggaaaatgtgatatcagacagtgtcgctcgaaacagataatgagatagggacccagtgggcgatcgctgaagggcaaaataaaccaagacatgagaccggctccatgccgtacaataacctgctgcaatatgcataaaaagggaaaatgtaaacagcattgccgtttataaaagttggtgaacctgcaagagaacgcatgcctgacaaatcaaagcacaagaatccacatgcaaatagtatgttgtggtcaatgccgaccgagtggaatgaaccaaattcgatgatatcccaagcgcacctcggtccaaagccccgtggttcttgcgccgataatccctgatccacaggctgccatttccggtgtccaacctgtacaatcctccataggcctcataattcgtaaatcgtgatcaacgaagatcaggtagtgccagcacagcccgggcgaggtcggaaacgaaggaaagcatcgaagaaacgggatagaacgttatttcattcggaaaggaagtcgcatctgtcctcgcgacgggggagggattttggtttgcaagtcggcttttgatgttgatccaatcatcgcttgactccccggatcgtccggtttatttggtcctcgtttgggtttattgtgggtgtgtatatcgtgctcatctcatcctccgaagccgaccttggctgcgcagcggctgcagtagtaagagttcatgccgaactgaacaacgctgcggcctgattggcctaggctgagagattgttggcagcgagaacatcggacaatgtcgagagtctggggagaagtggcctccgatgggcgagcaacgccggcggtctgaggttgaggagtaatttgcactggagagctcattttgaggagattttgaactcgagtgaggatttgaaagagagaagggcgctggaaattgttttgcgttgacgcagttaagaggttgagccccgtgatttcttggtttacttcggttttctttaagtgatgatgatttgacttggtaaacaggaaaggtgtagaaatatgaaacagggaaagatcacaggcttttaaattgttttcaagccacgaaagactccgtattcccccttctcttgccgatcatacatgtgggctgacatatgggctgcttttaggctcttgttccaataactcggcgctgacgaggccattattccgataactctgttacctacgcccatcggccatggcgataacacacatctccggcataatacgatccttgatcactggcctattggaaaactaaaaagttgaaacaacgtcgtgggaggcactatatttgatacaaaattgatcatctccactttcatccaaaacagaactaaatcagaaggaatatttttagagtcatgtacatttacgtaggtgggcgtctcaatatctcgacttgcaatataaatacaatctaccgacttggacgtatttctattatttcttttaagttctgaagatcctgaggtcattgtcattgtcattggggctaatacccttggaatactgcagctaagccagtttaggccatgaagccagagagaaagtcgaataaggtgtggcaaaccgaagggaaacggatctccaaatgaattcattggacgattcattggccaattcgttgggaaccttggaattggaacatcccactttggccgaagtccatggatttccacgaatagcacccgtggcgcatcagattcgcgagcgacgtcatattacctggattcggcaacctctcctcttctctccacctaacgtgctacgttgcagattgtcgagtcttcaattccccccccatcttcgagcctaggccaacgccaaaaaccgtttagattcggcccttgccccgcaaaaaaccgaaatatttcctgcccctcattcttgtcccacccacgtatcaccatggccaccggacaccccaaccttcacagctttcccaacagcgatgagctagctgcgcaattgcgaggctatgtcctccgctgccagaactccgctttttcccgacatggcactttccgcctcgccgtctccggtggctccctgcctgccattctagctaaagctctcctcgccccgagcaatggctccccggaagatactccccaattctccaaatggcatatcttcttcgccgacgagcgcgctgtaccgctcgatgatgaggaaagcaactatcgcctgctgaaagacgagctcgtctccaagatccccgccaagttcggctcacctgtcgtccacgccatcgacgaaaagcacattggggatgacgatccccaggaactcgcagatctctaccaagaagacctgatgcgcgagtttgcctccaaggaaactgtcaaattgcccgccttcgatctcatccttctgggctgcggtcccgatggccacacctgctcgctcttccctggccacgccttgctccgcgagaaggatgcttgggttgctgctgagacagactcccccaagcccccgcctaagcgcatcaccctcactctgcctgttgttacccacgctctcaatattgcctttgtcgcgacgggtgcgggcaagaagggaatcctgaagaagatctttgatcttgaggagggctctagtctgccttccactctggtcaaccagggcgctggtgaaaaggtgacctggttcacggatcacccggcagtggatggtgtttcattccctcgtcgtgggagtctttaaggtgtgagatgtcctagatggatttgagaggtatggatatggtggtggcttctttcctatttcgtaactctggatatgccttgcatggcattgaatccgctggctgtgatgaaaagtgattgctaggattaatagaccaaactcatatcttaatctgtcatttttgtccatacattataccgcacagtagcgatttcttctagaagtatgtccaacatcggaaggtcctattgtttgtctgcttatcctttcaggtctttctagctggaatactgcaaacaaacggcctcaataagtccggagacaacaaatataaccaactgacagttttgtaagacattgttggcattttagggcgagggagatattagaaccggtagcggagttcaacccactttcaaggagcagatagctaagtccatgatctttctcccctttggttcgatgaccagatgtaacagagatattatctcgtaacaagatagaaggttacatttatttttgaattgctcacaattcgcaatgagagatatatcacgccggtgctattcctaaacctgacactgctatttagaaggcaactatacaggaaactagatatatggtcattttaccaaatactcgtacgctattcagccaaagagtggtgtcgagaattcttgattagaagatcctttattgattgatgtaagatatttgcagatcaatcaaatgtggtcatatggagctgaaccccttgcattatgctgattctccaaccgcaagcatacccgaaaattcgttgagatttgccaaattcaggctctgtacagcgtatcacctcaaatgaaacgggttgcctaagaaggcctatctagaaaggggccaaaaatgttcttgttgtccatgctatttgctagcatattgccttacctttgaataagcccctaaagcagatacgagacaattcattgagagatacatacccaatctagtaacgtatcttaatgtcttattctgccatagatacggaggacaatgtactttgacagtgagtgcccaagccacgcagcccgtgccgatctcccgtttctagccggccccccacaaatgcatgtaaccccggatttccttacgggatatagagtacagcttagtctatggcctctttaacggtttgggcagttattagcctaaactagttggtatgataaatgcgttttggatatggagcatctagaccataggtgtgacgcctatcacttgaccgctaggtacaacaaacagctaaatgccggtcaagtaacccacaaacatgaaacgacccaactaataatagtcccctactctcatatatgcccacagagaaagctcaattggtcaatacgtaatcggccgagactcgtggacccctggggctgtcttggctgtcgatgctgcattgccctcttttctctgtgacattgtgctggccggccctagctgtttttgcatttctccaaacaaccctggtcactctgttacaattaagaggtattagcgagaaatcaaagttatacgagggagaagaactcactccaccatcaatcttgcaaagtgtgaagcagttgttggaccgggaagaaagtgccactcctttgccggcttcgataggtgaggcaagggctagaccaaggacagtcgcaaaggcccaaataaagaaacgcatattgaaggtgttggcgggataggttgttggatttgtggtgggaacttttgaggatttgataaagtgatcattgtttctcaaggtacactggagcctcccttttatattatcctttctattgtatactacgtgatattagatactcaattcatcccccttgactgctgtggggttccgctcccacgactcgtgcgggcttatgtgcatgatctccaacatgcagggaggatcctcgaatgctcactcatattccaaaatgccaagatcgatctacatggagattgtgctgtttgagtaaagacctacaacttccttttcagctcgatggctatacggtgtcggctgatccaattcctgcaatgtaacctcaaattgcgaaccagcaaggcatggttctggtacattaggcgtccaactataaagatctgcagcctatcgcagctattaggaaaatagtcaagataacatcggtcccatataaagcccgatgcccacgcgagttatgaaactaattcgtcagaagtgcacccatattcactacaaacctcacaaagaacctcaaaaaatctttacaaatcaatccctcaaacatgaagctgtttattgtactttttgcacttgctgcctacgcaatggccgaggccggtccgaacctggaggcgagagctgggtgctcccagaagggacaatattgcaacgacggtacattcctgtgctgcccgggacaagggagctgtagtggaggtgtagtaagtttgcagcagctctctctctagagacagatatggtcaaacatgatatcagatggctaaaatgagtcatagtgcaaatgagcaacgatatacctaccaagggagcgcagaggtagctttatggttacgggatccatatatcgagattgttaggactgtctctttggtcaaagttcggggtactccaggcagtgtgttcctatgttgccgattctaaacggccgtggataaagctttccatccgcaataaaagccaataatccaatgaggatttattgcaccttgctccaagtccctgcttcataaagtcagcccgagttcgcaacttaattagtaagatggctcatacccctctagctcgatattagtggagcgtagatccccgtggacaataaatagtcagccggcctctgtccttgacattatagccttcgattgcaaatgttttcccagccgttaatacgtacaacccattgtttagcactcatgataatatctcacacatgctcacgcatagcaacccattcgctaacatcatgagcagctatgcccttaacctaccttatattagctataacatctgttcgctcgagggccatcatgtcagatgttgcttcacagacttcatttgacactatatcttgcattaaggtgaagaacactatcattgccggaacccaggatggtaccatttgtgtgtgagatctcaccaagaacaacaacaaccatgcctcattgatccttaacggacacacaggtgcggtgttgtgcctcaagttgcacggcaactaccttgtctctggtggtcatgatggggtggctcgtgtctggaacatcgaaaccggccaatgcaaggatgtactccgaagccacgagagaatgcgcatgcaattgtcactgctagcacatataggacccacagcgcaaaatcagagatcagggggtggctgcgaaacattgaagaatttgcaggtattttaggaactacgatagtcaatgcaagttcaagtacattgactccgaattgctggaccacctccatatggtgcgagatgacttggtggatatgttgcgaagtggaatgggttgtgctcgacggcaaagacggcaatggcgtcattgctctggctaccatgcctacctgaccatctcgcacatgcaatctcgcattcgacagtaattgatatttctcccatctcacataactgccgttaggtgccctctatttcaatatataacgatgtgattaggaagtgacgggaaagtgactgctagctgaacgtcgacaaaggtagcctaaaagaggtatactcgtcgggcatagagatgtgggttttattcttttcaacatatccaaacaaaatccgagatcactgtattttctttttttttttttcaaacacttccccatgtgttgtgactgccggaggatatgttataatctcatctggtgacaagctgatatgcactggtggagtgtaggttaagaataaaagagtgggttaccatagggaagatcgcacacatcacctccccaactctccgttcacaacaaaacactcatttcatgaacccaatgcattatgccgattctcatttaatgacctaatacgaccatgcctatcccaacacgttcattttcgctgcgtgatccccgtaaacaagtcagtcccccggttgtttatcccttgaagctccccacaactgtcgcatccctcactgtgccactattgccatgccaacaactacagaaagaaaccatgctaattactaaagacttcaagtatagcacgacctgccacaaaaacccccactccactacccggcaccgctagcccgagcaaggactctgctcaagagacgaatagcaagaaccgctcgccatcaaatccctcgccggtcgagggtgttgctttgaaagacaatggacccactgctcgaggaaaaaccctacttcctcagcgcagtaatcttgccctagacaatggtcgtggcacgggacatgggcgcattcagccacctagcatcaagccgaaaccacgcgggcacccgtcaccaattagacagccagagatatcgccagctaggaaacaaacacaggcagattccacagcaataaagattggggtagctcccagccgtcgtcaaagcatcatgcgacctggtgccttgaaggtgcctttagcgaagatcacggtcgcttcgtcaaagagctcggcacaatcattcgcgccaccctcaccccgcaaagctccaggaaggccattaccagttcagcctcatacgatcagaagcccctcttcacccaagaaaacagagatgctacctccaccacgtcccacacggtccctctctttacggcaacctgtcagcgctagcaagggaccacccacagctgccaaaacacatgtccggcacaagagtcagctggcacagaatacaaaacaagccgaaacaaccccggtaatcggccaacgtgcacgagcacactcaacataccaacggccgtcgtccccaaaaaaatcgtccaaacctccaacgcctacccctggagccgaacctcagtctggaaatgtacttatcccttcgtcgtggccggatatcgcagcactacaaacagaacttcttcagctcagtcttttccattccaactcactacaaagccaagctgaatggaagtctgattccgagtcacgtctgcgcaaaaagtatgacagtgtcgctagccaatatcgattggtactagcaaatgaaacgcaacagcagtgtcacctgaatgcacaggccctacggctttggctttccaattgtcgcgaacatcgcggtccgcatgatttctccgagcaaatccaaattctatcacgggttctacaggatgtctcggacatgattgctggcagtcgaggtgcacagtactctcgggctgtaaaaaccttcgaagactggctcaaccaagcggagcttattcgtcataaacgtgggtcggggtgccttgatgtcggcgcctttattgatcccctggggcggagctggaaagaatcattgcatgctttaaatgtgaagttggaactctgcgtacgccaattacaagtacttgatatcccgggcttgggggaattggagcgtctagaacagtctgctcttgccagagtggccaggaatctggttgaattgatacagctgatgatgcaggagattcgtgccatgcaaacattggagacagaagtggtgcgttcagaaagagattatgtcggccttcttgcgacgcagctggtatgctctatgaaggaaacgagggctccccaagtcggcgcatggaggagctagtctgtggtttatgcatctttgcataaacatgtagttttttaccacctgtacaaacgtgcgcatattacgtcgaaatgaaaaggaatgacattacacgaagagtgacagtatttcgcccaaagtaccttgcgcccaatcatatgtagcttgcacacggtatctaggtaactagtacataatggagatgggaccctgcaacggggacagcaccgggacctacagccctacctgcgaaacaggcgtgagagagaagtcgtcaatagtggtattagtgtactagggaggagaacaccatggggtgactactaagaagagaaggtggttgatgtctgcgttgctatctctgcctcggggggcttttttagttatcacgtggcagcttagtcactctatactggagcccaacaaggtaaaccgatgagtcagccaccgtcatctccaccagggctctagatcttagagttatcgctcgtattcccctcatacttttatttctatctttctcactccatcgtcacttgtctctttctacaccgtacagatatctactggaatgatatgcttcatgcagggtgatgtaaccttgggaaagttatctctcagctctcttcttgacgtcatccacggcagcttccgttttgacagataaaagtcacccgcaaagagacggtatccacttgcttagtacctttcgagatgatcgccgatcgtacctagtgaagaacttcaactttctcccccatctaatccagtgatcatgaaagactcgctttacgatcgcctttggcgccgggaatgcggggaacagctgcggtattctgggcttcggggaatttacggatctaaggaatggatcaatgatctcgacattgtgaacgaactcggtgggcatactggttgtgtcaatgccctcaggtatgtttatagcttctgcctaggcctaggtactcggtttcatcgactggccaacacctccgccatttctgatgcttgccatgctaacagtctcgcagttggtcaaagtcagggcgtcttttggcgtcgggctctgatgatagacacctcaatatctactcctaccaacccgactcctccgatgccccattcgcgctcaacaccaccgttgccaccggtcataaagcaaatatcttctccgtcaagtttatgccacactcaaatgatgggactctggttacatgtgccggcgactcgcaggttcgcgtcttcgatatcgaatattcaagtgggagtagaaatgatgctaccacctccgcatttgcagcctccactcagagccgaagcttcgatgagttcttcagtggcacgcggtacctgagtgacggcaataccaacgccagattgtatcgaagccacgccgatagcgtaaagcgcatcgttaccgaatcctccccattcctcttcctcacttgctctgaggatggtgacgtccgccagtgggatctgaggctaccatctagtgcataccctccgccacgcggtggccaaggcttcatggcataccgacaagggttagaacatgatggctcgaatgttccaccgcctctcatatcttacagaccatacggtttggacctcaataccatctcctgctcgccaagtcagccgcattatattgccttgggtggtgcgcacctctactgctttttgcatgacagacgaatgcttggccagaagacctctgctagtgctgccagcctcaataatgacgaagagatgagcaaggcgacgcgatgcgtgcgaagattcgcaccgggtggcaagcacaatttgaaattcgatgatggacatatcactgcttgtaaaatcagtgatgcgaaccccaatgagatggttgttagctggtctggggatcacatttacagttttgatttaatccgcagcccagatgcccgagaggtacaggcgggcgataaatcgactctcaagggcaaggatcgacaggctcgccgcagttcacggagccggaagcgcaagaagcccacaacaccttcatcgcaagaaagtgatggccgacatcagtcccaccgtcggtcagcagagccagataattttaggatccaatatgagaatggcgaatcagaggatgtcccatttcccacattatcagatagtgtcatagacaccgaccccgagaatttgctcgagcaggctcggtattctgtgctgaatgatgcccagcgattgagcatgcagattgcaaaggggttagtagaacttcgaaaggctctgttctcagaaccgacagtccgggacgccgcagggtccgacgaggtgggacccgaatcgtactcgagatatttttcatccgcactggaaattgcgtctacgtttcttccacaaatgggcaatgtcatgcgcgactggcgctatcccgtgaacccatcacaggagacagttaatttccagcaatcgcttcgtcgcaatcgccaatcgtcatggagatttgtccaggctgctggcacacttgctcatgcattggcagatcaaacgcaagttctggaagaatcaagtttccaaatgatcaggcctgcaccaggcgaagatggccctattgagctggcagctcagtttggctatgaattcctccgggcaattcttctttggctgcagggtggcaggcggcgtcttctagagggctttcaacaccacaatgcccctcgacgattacattgccgatttcctatcccagatgagtcaggagaggatgccatcgaaaccattctagtaccctacattatggaattggcccgtgacactccgattgtgaatgttgacgcctccagattcgagcatgacagtacgcgcattctgttccaaacccaacgggctgccgtgactgcatttgggaatgctattagattgcccttggaagatcttgggggctcggctgctcggttcgacagaagccgtgcttctaatcctgcctcacaaatccgctctctcgaccgggcctctgcgaagaggttctggattttacgagtgggccgaggaatcttgatgggggcaggcagtgaagtaaattacagatttgtcaacaatgctttcggcggacttcacaccacaacgaacgagtctaatgatttgaatgaagaaagggacccagtttataccgatcgcaatgtggaggaagaacgaatccaacacattgaactcatcggggctaggcaaaataaccctcggcctgaaatctctcgaggcggtgcaacttcttcggacaatagcgacgtcaatacagacgagaatgatagcgatgacagccatgcagaagattcaaccgacgatgaagaccatgatggctggcccatgcatttatcttcagatgaagatagtgagggatttgattccgatgacaatatgccccagagatatgccattagaaaggcacgacatgagaatgtcgagcgccatgctccatgtgtgcctcacatgagaagctatcgcggtcactgtaacgtcaagaccgtcaaggatgtcaattatttcggactagatgatgagtacgtggtcagcggctgtgattctggccatatatttatctgggaccgcaagacgtcgaatctagtcaacatcctagaaggcgatagtgaggttgtcaatgttgttcaaggtaatttccttcactagttaaaaagacaaagattaacattgtgatttaggccatccctatgaaccaatgatcgccgcttcaggaatcgatagcactatcaaaatcttttcaccagaccggaacgctcaagatgatgcccgtaatggtgtgaacatcctcgaccctgacaatccatcaaacgcgtttggacaaaacaactctagtatcggcggtctcgtgagccggaagcgagttcatgaaagctaccgtatcatgagccaaaacgatgttgaacgtcgtggtggtatgagtgaggcacacatcactgtaaattacttgccctcgatctctatataaatatttttgctgactattacctgaagcggagcatgctcgagcgcctggctgttaacctgaggggccgacatggcggccttggaattgatgatattgctgcttccggtgaccatcggaccgttgtcatcgacgataattgctcggtatgtcaggatttcttccttatacgtgggaatgatactaatcattcgataggtgatgtgatagatgaacaggcagagctctggatatctgcatttgcacagtgtcaaaaagatcatcagtctcataacctcatacatttattgtcatagcatcgcattacagtctctaatgcaagaaggcactcttttacttctttcattcctttcttcaaggctgcacctgccctttctatatttaggtaccttccttccttataaagccaagcaaggcctagaatacctactatcaccccaacaactacgagagccctatattcaagcaacactacacacatctggaaaagaagtagggcgccttgagctagctcttcttacaacatgttatacccgctgatcttacggcatatggtagcgatatgtgtacccctgtatgtgtaaattgcagacactggcggtattgtcagtcaaatccatactcggaaatgaccgaagtcttttttttggtttcgtcgattattttctatcgagcttattatgaagtgtactcgtgttaatatcaatgtgagtttaaatgatgatcccaagtcacaaatggatcaagtatcagttcaattagaaatttatgcccaggaaatgaggtttccttctgataattggcatgtcttcgttcttcgtctcgtcaatctagaatattagatggtacagtagagacagtggtgcggatatattgactagtggtgatattgctggcaacaatatattgggcgggtgtgtaatataatcagcaaactagatattcctatagatgcagatatggatttctgtagccgatattcgatattcgatataccttcacgtgaccgtccttatcgtagaaattttttgcgataaaaaaggaattgcccgcgcgaatatctagaggggcagatcacaaacttcatttataaaagtcaaaagtcatttgatattgtgtcggtgctttaggctcagctgctgtagtctaggtcccgctatttcccgaccactctacatctcctaacccgatatcacagctaagtatcgattctatactgcggttttggctgtcgaaaaccaaggagtgtgtaaaatttgttacatcttggaacacatcacatcatgtctgcatcagaattgctccaagctcgcaacgagacaaccactaggctctatgcagaccctcacaacccccacctccaccttgaacgaggcattcagtatgaaaagttgggcttccccgacctcgcctctgcagattcatatcgtgcgctagcactgctggagtcggtggttgacccagatgagtgcgagttccatgccaggcggaagatagacccttcccagcaggctcccaaaacggtggcgaatgaatcagatgacgaagacgaagacaacagcactgtgcctatcacccaagaggaatatgatgccatcattgaccaggtctatgtccttctagtacgcagtctcgtccgctgcggctgctaccgcgatgcattcgagttcggcgtgcgcgggttggccctcctcgagaagaggtctgcaacagcctcggtagctgctttgaacgtgcagatggatcgtgtgaaggaaatatacaaatctcgcaatggctctgaaacagaaaacatcgatctagactcaatcgatcccagcgtcctccctgcacagggcttcgcccgccgtgtcctctatccctggaatgggcacgagcctgaccgccgttcaccagagactctcaaaatactcaacgagcgattggcggccattgcgccgaaatgtgaggtccgcgcagtggccttgccagtgctgcatgcctcggcagatgacgactcgtccggcatggacgtctccgtgcagctcggcctcttcgcgaaagaagatatcgccccagacgaaatcatcctccgcgagtcttcactgctcacagcaaccaaccgtctccacgacgatctctgcgatgcatgcaacgcaccgctcccagaactgtccgcggccgagccccccgtcgcctgcgagggtggctgtgtagatatcatcttctgcagccaggcatgccacgacacagcgcaggaggtttaccacggggcaatctgcggcctcgaggatggcctcgactctatcggcaaggatgtccccgaccctaaggataaggctgattacctgtaccttcttctgcttggcagagccctcgccatgtccgccacacaggacaagcacccgctcgacctgcccgagatgaaatatatttggggcgatttccatgatctcgatattgagtctgtctccgcggaaacagagataacaccaaccactgacgataccgccaccctccccttctccttccagctgaatgtcctgcagccggagcgtttcctcgacgaaatgggcctagatccatacgtcgcgctctaccgctacgatacctgggttctaaacacgctctttgctaagttccgcggcacggcatcaggccgactttcgacttgggatggaggcccggagctgtgcgctgttcatccactgtggtgccttgcgaaccattcctgcgatcctaatgtgacctgggaatggagtagcgaaatcaatttccgcgtgcggagagacgatgagacggctgtttggtcgcgtgggcttgagatgaaagagctaaggcctggcggtattgcgaaggattcggagatcctgaatcattattgcgatattagcttgcccgttcagaagagaagggaatgggcttctggggctttgggtgggacttgtttgtgtgataggtgtgtttgggaggctggggaggtggagtaggtttgtatttatgggttggtgtggattgccttgatagatcacgatgagatacccgtttaactgcattcaacgagaagatttccaatcaatgcctcctatagatcaaacacttattactggagtcatacaaggtgctctatttgaacatgtttatttgaacattgaggaaatgcaaccctcaccatgaagaataacacgtttttagtcttcaataacatacttcaggagcgcagtgacttcgcgctccagttttaaccaaacttcttatatttgtatatgtaggcgaacataaacatagtaaaaaataggaaaaattcattcaatgtatatcagtatgtttagtaaatatctattagtttgtcttcgatctaaaatatggtactgagatttagacttgatcaatctacgatctagaatattccttagacttgcgtgtgcgtgtgaatttcccgggcattaactatcgcctagtctcctttctgttttatacgtattcgtttttttgcacttatctgttctataagatatttattttgtaggtatcataaccgaagagatgtatgttaatggatatgatcattgtgctttgtttttcattcttctttttgtccctgcagctagttgagatggatgctcatataggtatgtatacttctccttcaggaatcccagagccactaagaggactatctagaaagaaaagtaccatatttgaggcctcatatatgttagttactagtgctaagattctaggcaaaactagtcaggaccagcaatgatattagtcagcggtcgctgacgacaacagtcacagcagtcacccgatgtgagtggactcgatcatttctaagacccatttcctctgagagattattggcattgtgtggaagagaacacgcgtatgacagcctccatctactccgtactcacccctccttttgatcgacacagccgtggatccacttcagatgagtgaccttcagaaatcatttgccaagtcaaaattggccaaatttccccccgaagcaccaatgcctgagtcaatgagccactcagaggatgcatgggaggatggctcttcggcttcctcgctgtcgtcgaccgggacgatggtcccgtcacctacgcgacagctattcgcccgaacgggacgacggttggtttacttctccaatttccataagctcaatttaggctcaattgcctatttgcatcatccaattgtctgggactaggctaatatacgaaaacagacaatcatctcaaacctctttgacatggacagacttctttgaccaggaactatttcttccggaggatgttgataatctccatattttacaccatgtctatttaacaccaccgactggatcaggcccgctttttgtcatgcaccatggggccggttcatctggactttccttcgcgacgtgcgcagaagagatccggaagatcctcccaaaggcggggatcttgtccctagatgctcgaagccatggccgcactgtcgttaccacattggacagtgagatagatgatggagctccttctacggcggctgcagcccaggttgaggcctcgggaaacgttgagctcgacctcagtcttgagaccctgagccgggatctagtccatgtgatctaccagacacaagctaggatgggttgggagaacctccctgatatagttctagttggacacagtctaggcggtgcggtgattacagatgtcgcgaagagaggagagctgggtcagaagctattggcatacgcggtgttcgacgtagttgaaggtactctcgtcttgttggtttatgtctatctgatactgacatccccatttgacaggatctgcaatggatgctctccagagcatggagaaatatctttcgactcgtccgacccgattcccatccctgctatctggaattgaatggcagtacgtgtccatctcgactgtcatttctttacattatcgctaacattacaagtactcgctctcgcacaatccggaacaccacttccgctcgcgcctcggttccctccctcttatacgaagaaagcgagcctagcgacccgtcccgcccttgggtttggcgcactaacctctccgcaacgaaacctttttgggaaaactggtttgttggcttgagcagaaagtttctcgatgcaagaggtggcaagctattactacttgctgggaccgacagattggataaagagttgatgatcggacagatgcaaggtatgggtttcgaaagtccctgtcagccatgtataataattcggtaccatgctcactacaataccataggcaaataccaactccaggtcttccccgaagcaggccacttcgtccatgaggatcagcctgcaaagactgcgcagatcttagcggatttttaccgacgaaacgaccggagtgcattggtgcttccgcccaaggtggcggatatgcaggcatcagcggcgatgaagaagggaactggtgctcctggtggctcaacagcgcaccagaggtagtatttcatgatttgtcccaatgcttgaaatgagatatgatatccaatgagaggctattcatagatgtaaaacacatgctttcgagcagtacatctataacgctctttctctaatgctatcacgtctactccgtacggttgatgaggttaagctactcgcatgtagggaaataaattagaaaaagtttcattctcgaacggggtgaaaagatcatttaggacaactagcaggctagcctccagttcggagctctatgccaccccattgcgacaaacgttaaagtgaaaaaaggaaaaacaaaagctgccgggcacagaaaaaaggttcttgcctctcgctcgataaacagagagaatcaggttttcgagattccgaacgccaccgggatcccatcacaagtaatcatcatgcgaggatcgtgaaaagggatgtgataaaacaaggagaagtaagggtatcctgagagagaaaaaaaaaagagagcgcatgacgccaagaaaaacggacctagatgccattttaaggcaaataggcaccaccagcaaccaccagattcatattggtgaacttgaccctatagacaggagacttcttagtcgggaacgcgctgatttggtcggcggtgacaacaacatcttttcccttctttttcttggtctggcttgtcgaggggtttgcggctgcatccagtctggttccagtgcctgattcattgaggatacggccaccctgagtggtttcctgggaaccagcaacatcccagactcgcacggttccatcggctccaccggagaccaacactgtggactccacactccagctgacagaccagattccacccttaccgtggccacgcatgcgcttcagcagtctaccaggagctagatcccacaagatgatgcagccctggtcgtcggcggatgccagaagctttccatcgcggctgcactccatcgcggtgatactaccagtgtggccagtaaacatgcggacagcattaccagtcgagacagcccacatacggacagtgtgatcagagctggcggtgaaaatgtatgccgagttggggtggaagcagacgacatccacgtcctggtcatgaccgacaaaaatacgctgctggcggatttggtcactcacccacaaacgggcggtcctatcagatccaccggagacaaagtagtgaccgaagggcccccagcttaggtcccagacagggcggtcgtggcctttgtagacgaccatacattgccagctatcaagggaccaaaggcgaactgttttgtccatggatgatgaaagcaaccagcgtgcattggttggaaccttgtcatcctccgaaatgccctcgcgagcagtggcgcagggctgaaatgcaacagcagtgacgggaccggaatgaccgataagacggcgcgaactggcaggtggtgagttatcaaactcagggtcagcagcttgaatgttcgtgccatcgaggctccaaatccggatatacgactgctggaatccgacggcaacaatctggctgtcatctgaaaagtccatgcaagtgacgctgtatatttgttagtaaagctctgtattacgaagattgtccagatgaacatacccatcataagtgttgtggaatgtgaacatgcacacactaagtccaggaccgacaccacctgtgcgagccttgatctcgaaccgatcacggtgttccatgactttcttcacctcaatttgaacgtcacgagcagtggacggagggaaaggaatatctgcacgactaggtgcttcgtcgtcatcttcattcttaatcatttggtcgaactcttgaatgagcgtgttacggccagcgacaggaggttgtttcgcatcttcctcggctaattcagcccgcacatcctcctctagaagctgttccatagggagtcttccgagtttcaggcgaggaagtgtgccggccatggccgggttgtcaccggtgtaagccgagccggggtggtgtcccggaatgccttcatcctcagccgggaaggtctggtctgcactgatctggttcaacatggcagcgaaactgaatcggtcatctgctgctcggtccaaagtcttcaccgagcaaaagctgctgagaattgcgttcatgacagaacccccctccttgtccttgctctccaggaactggagaagattggtgtaagcagggttgcttaacacaacgcggtatttgttgtttcgataaagcttagcaacggagttatcttgcaggtgctccggtaagctgataggctcgaagtggcggacgtcatcggtatgctcgggaaggaacatgttcttgttggtttcgaaaaatgacttcgcatcctgaggatagaaggaagtgaccatattgaaaaaggaatagacgaacagcggccatagaacacgccgaagttcaggctacaagacaattagcattggcttatcaagtcactccttgtctgtcgcaccttgtacagatcaagattttcctcaacccaattcttcagtaaatctagtgatgcattagttgctatgttgggtcacctgaatggaatatctagctcaccaaacccttgtcgagtcttgggacgggaatcttcccccagctgagggagcggacgcccatcaatctcctggttggcagattccatgcgcaacattgcctctgtacggctgtagcccttcttggccaaataatcaataacctagaaaataccgaaggttagcgtacaattcaaaccgaatgtatttgagcaggaaaaaaaaaggcaagataagcaagcggtgcaggaggagggcttagtgaataaacacactgccagatcacgttcgcgtgcctgctcagaagtgagggcttgtgaaggctttgcgatgggtggacacggcacatattgtgccggagtcatatcagccgccaccggctcatgtcttttctggatcatctgggccggtaaggtcggttgtgggtaccggcgaggctcgaaatccttgccgtgagtttccatggtgtgatgttttgcgaaagcggtgcgtttgacgtgaaagtgaaagaaattgatgggttgatgggttcataaagacggataacccgtatgaatgataacgtgaaagtgtgaagaatggttgggtgagaaccgcccgaagcaaatcattgtttggctctgagttgtgatgccttgagtcgctagtcacagaccttgagcaccgctcatgagttgcaacgcgtaataccagcaggtcaataatgcccttcgaagtctgtgagatgaaccatattgtcggcgttgcagataagcccgcgcggtcctctgccatggacttctgtcatcattcataggttgtaacgactgatgaacagcgtaattgaggactcatggcattttcaaaatcatcgacgttgatacaaaacgccccagagtctccgatttggatccctgacatcactttgatctagtggagttgtggccaactcaagctcctcaaactcggctgatcctaaaacacacaggatggacataacgtgcaaggaataatcatcgcaaagggacacagggacgggagggaaacaagacttctcaaacaatgcacaaatgaatcagaagggtacctactatttggttcaaattctgctgtgacatagcaccacttggtggtgcactaggccctggggtgggtgcggaatgaacggggtttccaggcaatggctgctgggaaggcatcgccataccattcccattgacacctggtcccatactgccactgcgtggtccagggcttggggctccaccttgtgccgacatagttgtcgattaattaacgacagcttcgagacagattctcagattggggtggaggatggaaactgagctgggttgcgtgcaatcgcgggcaatttatgatggtgttgggcggtcagctatcggttttttgtctaatgtatgtagcaaacaaaggtgttcaacaatagaataatgggtttgatatcttgaatttgatagttgctacctcaccgcctattaagacctccccaacttccggcacgtgatttcaactaacaagcttcctaagctccattcgttctacactggaaaagctggtggattgattcatacgcacccagctatctgtccttttcctttatatcaaccctgactagtcacaatgagtgaagacgcacccccgcaggagctacctagctatacctctgccgatcgcattcgacagctgaatgagatggataaagtactacgaacatataatttttgcaggaaccctttgctgactcttcttttctttgcaaggatgtcaccaaacttcttcattctgctggtctcgcgatccaagccttgaccaatgccaaaccaggcccctcttctgttgcaccagatggatcacttgactcgcacaaaacgcgattcaaagaagcaagtgcaaaatacttcgcacttctctcctcagccgatgtatccctccgccgccagatctactccttagaggaatcatccctcgtagggcccgagagggcctcgcgcgcaggggacgtaaaggctggagccagaaacgaaggagccgcgggagctaaatcgcgagctccaaactcactggatataagtcggctcaatagccggaaggatacagttggaaaagataaggaggctgaattgtgggcggccgctcgtcaattcgttgagcagatacagaagccttccgagacaagcaagaatttcaggtcagcgaatgaactagatgatatgcaggtggattgagcgatgaattatcgattcattcggtgcgattggttgagtttgcttcatatgttcatgataccccgggctatctcctgccactggcgtttgagattacgaatacaatgagtgccattggagaagatacatacatttacaccgtactaagtacatatgtaatcaacgctaagaacaaagtgtttatggatcagtgttcgagcatgttcacagaactacgctatgcaaaaagagatgaaacggcaggtatagttcatcggtctagcagagtaaggaaaatattacttctgcatggacatgatcatttcccgctgggtttcccggtccctattcgcatcggacaatgggcccaagcctaggttaatgttagcatattgcaacggcggtgatactttgtgcatccacttacttcgcagctcgccaacgacatcctttgccttaccgaagtaaacctcctctgtgatatgaaagtctaggtcagtccaaaatcctcaagtcgttaaacggtgacgagagaaataaacgtacgtagcagattccgcatcttcagctccatatcctccaccagcctgcccacattggcgacatggctagcatcagactctacaggcagatcaacttccacctggcgagtcatgttgccgctgaggtccatgtcaccaagagcctcagttttgttggccaggtggaggataacagtactagtgagtttgtaatgggacatgcgagcgcggtcggtggcctcaaaaacgtgaatgctgtcccattcgccggagctctgggaacccggggtgacacctaatcaaaaggaacagttagccacgatctaagatataggaagttatccgcaatatgtccataacgcacccttcttcagtagaatcacgccggcaaatccatcgtccaaatcccagaaataaacactccctacgcctccctcatagtacagctcgcggtaaacatcgaacgactcgttggcggcaacctctagcttgcgcactcgctcactgggcacggtgccatcctcaagtggaggatcaaattcattgctccatggtgaccggtagctatcgccgtcgcggttgtagtcgcagagcagatagtcgcggttgctctgcgggcagcggcgaatctccaggggctggtcaacggaggagaggagatcttcggtgagctcggggacgattgaggtgatggcttgcaagttggtcttggtgtcccgtgggttcaggcgccgaaggaggtcgctgcagaaggggtggtcagctcacttgtctccgactacacggggcggggttgagtcggggtgtgggattgtcatggcggggtatcatagttgagttaaaaaagggtctatatggccatattaattgcgagagagattactcacagcgcgctgtcaaattgtgcatcagccatggttgcgaaggttggttgtatatctgttgctcaacagatggcggtgttgatcttgggcggatgaagtgcgtgtgcattttaggctgcttgcgtggcattacccgacatctataccaatcgtaatacatccacttctatttgcatccataaaaagacaagaaaaagttagacgaacgtagagctagtgatatctgtattcaagctttgttttatttgagcatatttacttcgaataccggcaaaatcttacaaggaaaagaaagataggccaatgtcggattgttggatcttcggagtttttaaaagaaattgagaaaatcattattctcggatgtattcaatgtgcttttctggagaatatagctattctaggcccatcattcgactaagtctgtgagtctggaatatcttgaagatcttcgacaggcgtgtctagaatgcagggagtataaaagagaatcaacaagttgatgatgtgaataaaaacctctcttaagtagaaccagaagagaggctcatctcatcctgccaccacctcgcaaagatattcaacctctccgtccttaccttcgccatctctctccccgtggcagtcttcatcatcccctccagcttaaccaacttgtccccaaaatgctcaatggaattatccatctcccatttcccatcaacacagtacttctgccctacagccccaaggaaagtaaaacacctgccaattccaaccgccccgattgcatcaagtcgatcggcgtcttggacaaccccaagctcgacaaacccatcttcatcaatcatccttcggatcaacgccggatctttgcattcagtcgtataagaaacatgtgatacgacggtctgcacccgggatgcgagttctggtgtcgcaccccgcgcaaggagcgcgcactgcaccatcgtcgttgggtcgagttcttgacttccaggagctgcgtccattttggataggtactttctgtcaccgatgtcatgcaacagtgctgcgagcttgacgactgccccgttgtattgcgttgtcgggtgcagtgtccgctctgcttccaggatcttgttggcaagcgctcccactctgtgaacgtgtgctgggttatgcgatgggtcatggcctgacatgcagtcagtcacgaaagcggacatttcgttgaagagcgtttggaattcttcactggtatcatccattgttgatgattttgatccggttgttgtggggttggctatttttggttggttcggactgaatggtacccaagacctatgccaacggtgcagatttgattttattaccgggatgactattggttcttattttcctaggcaatagcactatattttgaagaaagtaccgaattatccccgcagtaaacaaatttggcggtgaatgacactcatctcgttttatatacaccgtgtttagtgcaaaccatacaaacaaaacatgatcacctgactacgcgacgcgacgccagatgattgcacatacggagtgcaagtgcaatgcctttcaactatccacgcgatgtcgacagattccgagtcagattactttgatgatgatgacttcgtagtccctggaacccctgatgagccctcccgtcccgcaaagcggcgccgcattcgaaatcgcggggaagagcgcgaagatcaagatgacgattcctcaatcgactcgttctttgatatgggcgatgacgagttaccccctgggcgccgagaatcacctcatcaggatcgctccaaaattaagagctgtgtactgaagcaacccagtgttcaaaatgacatgtttgtcacgcaactcacgcaaccttcctcaagtccggaacgaatacggggcgcacggtggcagaagcctacagtgaggccccctccgccaaaatttgaaactagaagacaagatggtagtggtggacaggagaatcatccccatgatgatgaagagctgctggccgctctcgcagcttccttagattcatttgaggaggagaaaacaaccagagcggtataccaaccctcgagtttgtcaagcaatactgtttcgaaaaagattgtcctgccagaaaagacagatacgcatctatcggcggatgtgctgtttgagctggaggacataccggaaggtgcattcgattcttcgccatcattgtcaccagtagcgcgatcagcccagcctgcaggtccacaatttagtcaatcccgaggcccaattagaggacctcatctcagacagactacattattcggtatggccacttcaaaccctgaggcctcggaaccgcgccaacaagattggggcccgtcagagaagactgaaccaccgacccaacacaaacttgtcaaagatgctttggatacatgggtctaccctacgaacttgggcaaaaccagagactaccaattcaacatcactcaggcaggcctgtttcataatttactcgtggccttgccaacaggattgggaaaaacattcatagcggctacaattatgctcaactggtttcgctggacgaaagattcgcaaattatttttgtagcaccaacgaaacccttggtttcgcagcaggtatcggcctgtttggatattgccggaattccacgctcggagtcgaccatgctcacgggaggggcatcaccgggtattcgcgccgaagagtggaaatcaaagcgggtgtttttcatgacaccccaaacactgatcaatgacctaaagaccggaatcgccgatcccaagcgaattgtgttgttagtcgtcgatgaagctcatcgcgcgactggtgcgtatgcatatgtggaggtagtcaaattccttcggcgcttcaacaacagtttccgcgtgctcgcactcacagcaacgccgggatcaacagtcgaatcggtacagtcggttattgacggcctggacatagcacgtgtcgaaatccgtacagagaactcgatcgacattcgcgactatgttcacgctcgtaatatcgaaattgaaacatttgagaattcagatgaaatgattttctgtatggatctcctatctgtggccctgcagcccttgcttgaccaactccggactctcaatgcctactggggacgtgaccctttggggctgactgcgtacggtcttacagtggcgaggcaacaatggatgcagtctgacgctggccggaatgccaatttcggcttgaaaggcaaagtcaactccattttcactgttcttgctagcttggcccacggtatcgatctcctcaagtaccatggcatcgtgccattctatcgcaatgtcatccatttcaaatcaagctccgagggacagaaaggcggaggtggtaaataccaaaagcaagttgtacaacatgatagtttcaagaaactactcagccatcttgaaccatggagtaagaatccagagttcattgggcatccgaaattagaatatctcaagtcagtgattttgaatcacttcatggacaggggtgaagggaaagagttgcctgacggcactagtcagcccacgactcgtgtcatgatctttgtgcatttccgtgacagtgctgaagaggtcacgagagtgctcaaaagatatgagcctatgattcgtcctcatgttttcgtgggtcaatcaagcgccaaaggctctgaaggtatggaccagaagacacaactcagaaccatcgaggatttcaagaagggtacatataacacaatcgttgctacctccatcggcgaggaaggattggatattggagaggtcgatctgatcgtgtgttatgactcgtcggcgtcgccaattcgtatgctgcagcgcatgggtcgaactggccgtaagcgggccggtaacattactctgctattgatgaaaggcaaagaagaagactcctatctcaaggccaaagataactacgagaggatgcagcaaatgattgccagtggctccaggttcaagtttcacgacgatcgttctgcacgcatcttacccgcgggcattcgtccagttcccgataaacgacatatcgatataccccaagagaactcgcaacaagaactgctggaaccgaaacgtaaagggcgagcaccgaagcgacctgccaaggtgttccacatgcccgatgatgtggagacagggttcactcgagcctcgaatttggctggcgacaaaccccagaagaagaaggccactgtaaccaaaaaggcagccacccccaaaaagagaccccgggcccccacacccgagcctgtagatgttccgtcgctggaggacgttgttcttagcacgagtgagcaaaatgatcttgagcatcattatcaaaacatcggtgctacttctccgcaattcatccgattccctcgcaacgacgcctttccacgtttgcaacgcattgaaagacccacaaaggatgtgaagcatgggtctctcacgcgacgcatggtaaaagccttacagaagatgcacgaggctggccctgattgtgatcgtcgattcaaagagattttggcccgcgaaccgccttcgccagacgaatccagtcagacgcttcagagggattcagccaagaagcctgggcggaacccaaaccctttgaaaacaccgtctaaaaatactgctcaacgagcttccatcaaggccactctcacccccgctggcggggaggttgtttctttgctgtctccagatcgtgaacacaatcagaagaacgacccctttaccttcatggatgatgacgatggctcggattttgagttgatggatgccagtcttttgtttagtagtgggtctaaatcgaagagtcggagacagaacagaccaattattgaagatagtgacgagtgatgaaatagaggcacgcgttgatgttatctggatatagaaagatccttgcctcattcgaacgtaggaatgatattggatacagttgcattcccataactagacctacatgggtacgtacaatactgaactttatcgtcttcattttgttcgtcgcagaaaaaggaacgaaaaggatggtaacttggaatagattgtatttttttggggcttcgcagctatctgtttcttggtgattgtattccattctagcttagggcttgttgaaagagtgcataccactcccgctgccttcaaaaaaaaaaaaaaaaaagaccaacctggctgtaaatcatcaccgagtctcccgtctatcagaacataagaacattcggggttggggtctgggtcattgggtatttgtgtgtttgtgaatgatatcaaacgtgtagtgtcaatccgagagcaaagaaatcagaaagccgaaaacaacccacctcgagagaaagatagataatatgggtttatgcaagtgtttagtatgttgaaagccaacgcgaacgaaaaccgaaaaaggagaaaggacgaaagaagaagcaccagactccagttgcgatcagcgacgaggcgcgagcacaacttctaaatcaatgtaaagagtggagagcaaaggaaaaccagacaaaaaagagtcaattagacgcggtcacgagcaaagtcaaggacctcgcaatcatcctcaaagaaaccgtcgtcggctttcagcggagcggagtgtctcttcttgcggcgggtggtgatgacaacttcctccacgttgccggtgctgtttccaagtgtgatgaggttttctatatctccgccagccccaagcgagtgtccatggatgacagcgttttcatcttcgtcatcgccgtggtcatcgctggagctgttgaatgacctcaagtgcactttgatcagcggtatatcattgccaaagacccattgtccactcggctcacttgcatcgctgcctgaggagaagacactcaaactgacacgctggtccgtgtggaacggctggtatggggtgtttgtctcgatctcagcctgcgagagaggctggcaaaacgatctcgcagcactagatggttgatagctgaccgaaggtagaacaatagaggcatgaactactacttctggatcaaaggtagacaaaggagccggtccacaaggaccctgaagattatcaggcagtttgacctgggactccttaccgccaacaatagagtgaggctgcctgctcttgtggccgggtacagtagcacgcttgaggcgatacatcttgaagtacccggcatccagaacacccaagaatataaggcccttgttgcaaatccacgtcacccgagaaggtgcaggatctcgagctagccccggcaagtggagacgattctctccggcatggcgcagagtattgacagtacccgttgcggcgcccattgacttgcttaggcctgcggcgacaaccttcccgctcttcacactggcagcagaaggtaatgcaaatccactcatattgggaaatgcagcgcccgtggacgggacacgaccacggacagcggagaagaatggctgcgttttaccgccaactaacttcatggccgctgacaatgggttactaccggaagcttgactggtcatctcatctgccatgggatcggtagccggtggcttatttgcagtagactttgcacggcggaatgggggccactgaaatgcgcttcggggtagatcgaaaacgtggacggtgcctttacgtgtaattacggccaatctatcacccaccggtgccgtccaaatcacatcaacgatactcgatgtagtcaaccgtgcgtatctagcaatctggcgcacattgggattctgtcccgtctggtcatcagccataaaagccatggaccggcagtgcttgagttgcatgagatcccacacgtattgcacatcgcctttcttactcgctgtgaacaacatcaagccgttcggagaaagagacaagaagctgcaaccattaggaacctgaaatgtcgacactgggtggataaatgcatttcggatatctgtgccgtcttcgaatcgtcttaggtcgattatggatacggtgtcaggctctgttgctgatgtttgtgtatcctgagcatgggttggagggaataatccatacccctgtgtctggaggtccaatccctgaggtggccgacgtggagagctgccggatggttgctgggtgttccaataattgttccaggcctgcattccctgatcacccatccagcgggcacctctgacgagttcttgggcaacgcctctggccattttgtcgaagaaactttccccttctcctacatctgtcgcacacgacaccgaagggacagcaggaggactgcgagtttcaatgcccggaaccttgccgatgattaaactcgaaggtacagtgccctggatcgatcctctgtaggccgagggtgggggagcgaatgcaagccaccttccttgtacagctaagatgggcctttccagggtagagaaaccatggggagagtcggtgcgagtcccctctggatcagttgtagaacttgaagaggttgagtaacgacgggtttctttggattgaactccagtccatgtcttacccaggcactggtatgcagttgtttccggggataggatatgtctataaacataaacttccccgctgacgccggatgccaagataatgtaagcaccagttgtgaagatctttaattttcccacaggcgagggtgcaaaggatgggaggccgggaagattttctaggcatggcacaggcttacttgcaaacagggtgcagacatgttcgctagtccggaaagagtaaatctcaactcgggtttggtagaactggatgtcgtctcgcgcgcacttgtcgtaagagtgaccgcgaatagtcgaagggggaatttcatttgcgtccgatgttgcagacgagactcgaccttcctcatcatgcggcggcaacggcccatgaacaatgacagccacatgcggccgagaggatgcaaagggatcactagacgggtagccaggcaagagtttggcctcaattacacggccatttaatccagtgatctgccccacgagcctagtctggcgatcttcgatggcgaggatctccacggcaccatcgatcccaaccagtaagacgttcattcctgtccgcgagcctttagatgacaagctaggcagtgtatcaaagccacagaatgaatagtttccctcggcgggggaccgattctgagttggaataatctcaatgtccggtgctccgaagaaatgtgcctgaggaagatgtgggggaggcgcgtgattgctcattgggctcccgtaagagtgactctttctcctgtctatagactgttgcctcgagtgtagaccacttcgataggcattaccatagctagatggtaaagttcgagtctgaggagatgccgaggaaggatggctgaagccactcctttcttgaattgttggaaagttcaagggtgatgtactaggtagtgatgcacttggtatatccccatccataagatcggtgggggggctctttccataaggtaccgattgcgcccacgtatcggtgcggctagtgagatcgtcacctgctggctcatcgagggaaccgaggacatccagaacaggcgacgtgatagatgggtttacatgacgttcaataaagggttcagggtctgggcaggagagaggctcctctggtagtgggtcatatggttggatgctatccgtgaaatctggtgttaatggcactcattcatcagaaaaacaggcaatcaccggtggacacatacatatcatccggtggggtttcagttgcagccctggccaccttgttcttcttgcccttcttctttttgcctttcgcacttggttcatgctctgatatagtccgatgctggtccggggcgaatgggctatcgtcttcgggcaaacggctgtgctggcggatgatatcgtcaggtgccgccgggagcattcaaatagatgatgcctcagtgagaggcgataaagaagcaacagaacgaagccgctctcagtaccttatttgtggtctgagaacggatatgcaggatccttctgttcaagatcctaactgggaaccgggagcttgggaggtatgactaaagaggaggataactttcatagaatcaatcaagtgatcaaacatcacaacggcctaaagagactggggacgcgtacctgttttgacagtatccttaaaaataagggagttgtggtgaacgtagacaccactaacagcgtatctagagcggagatcaccctagacacgcggggaagctttgctaaataagtataacacagcaacagcttgagatagttcaagctggtgcagaaaaatgtaatccaaaatgacttgcatacacaagttccaaggtcgaagtccgaagttgagtcaaggaagaaggatgatgttatggttcgcgataagaagaagagggggggagctgaccccaggtcaccagtcaggtacggggctattagggtgtaataggggggcctgagtcagagcacgaaataaccctctgacagtgtcattcctaatgaaagtatgatcggattctcggtctttactctcctttgtctgtctttgtttctatcaccaatcttgactatgactgactatacaatgcaccttgtggcctacacgaacaagacgcatatgaggggaaacttgtcaaactatgcaaacaccgataaggctcttagtcatctcttgcgtcatggattgcttgctgcaaacgtccccttgctttgacatggtactgcatggttgaagtcaacagccgagtccatccgtgtccttgctggtcattcttgacaattccttgtttgtttattcaataaagttcgcctgttgaaggagtggctggtgtcatcgttggctccagccagaggtcacagggcatttgcggcatggccaaagatgacgacttgcctgggctttgacagcaaatgccgtttgagctaggaaatttgagctctttcgttagggctacgtggtaattcggttcatatatatttacatatatatggccgctttatcctccactattcttgcgggccatgttaagtatatccagactgaaagtgtttgtaaaacggttaatgtaataaaattaattaactcgagacgtgttttgatagccactgagctttgaaatagttgatggtacagaatgttatcacagagggttgccctctctcctgatatgatatccagggtcgcttaggtcttcttcttattggccgcggccttagccttggctgccttcttcttgttgctattgatcatgacaattccgataaaggtgcctaccacagcagaagccaagagtgttaggatgacggggatgcggatggcccaaacacgaggcgggaagatgtcgtggagcgggtggccggggtcgacgaagggctgtggaacaaaaatgagtatagaaaagcaaatattatcataaattagcataccatcaacagggtccacgcggtgtagtagagaaagatcgcagtcgcgaccagaagcatgacggatcccacgagttggcccagctaaagcacagtcagtggggtatttccattggataagactagataatttaccattctgataaagagcggcgctgttaaaagaaaagaaatatgaaggaacgtggatgaatcctgggctggacagaactaccaggaatctcaggagctcccgttattcgaagttggcctctggtcacgtgcaccgcgctagagctttctcctgctgcgtccttgaatcatctagtaacctcagtccggctgagattcacaaccactgttcctccggtgtacatcaaactttctagctaccccggaggcctctctcctcgttgaagatgtccgatttggatgttctccagtctgctgtgcgcgtgcccacgcctccacctggcgcgtcgtactcgccagccgcagcctctcgaaaacgctcacctccatctcgttcccctcctccaaatcgtcgccgatcccctcccggtgattcccttcaagatggttccgacgttcttaaagccgatgcagaatatgccgacgacagagaacggcaactcactgaacgtgttcgcgaacatgagaagcgcgaagcagcgcgcaagccgatgaccgaggaacaaaagcaggcttcagcaaaggcagagtacgaaaagctgctcaccatgcgatctggtggcacttacatccctccggcccggctccgtgcgttacaggcgcaaattacggataaaacgagcaaggaatatcagcgcatggcatgggaagccttgaagaagtcgatcaatggtcttatcaacaaaattaacgtttccaacatcaagttcattgttccagagctatttgcggaaaatcttgtaagaggccgaggattattctgtcggtcgatcatgaaggcgcaggcggccagtttgcccttcactccaatttacgcagcgatggcatctatcgtcaacaccaagcttccgcaggttggcgatttgttgcttgcccgattgattgttcaattccgcaaggccttcaagcgaaatgacaaagcagtctgcatttcctctacgactttcatcgcgcacctctgcaatcaacaagttgcccacgagatgttagcagctcagatcctgttgcttcttttgcataagccaacggacgacagcgtggagattgctgtgggtctcactcgtgaagtcggtcagcatctggaggaaatgaacgctcctatcgcacttgccgtattcgaccaattccgaaacattttacacgaggccgatattgataagcgtgtgcaatatatgatcgaagtgctctttcaggtgcgcaaggatcggtacaaggacaacccagcaatcaaggaggagttggacctagtggaagaggaagatcagatcacacaccgtgccggcttggatgacgagctggaaacacaagacactctcaacatcttcaagtacgatacggagtgggaggaacacgaggaggcctataagaaattgaaggccgagattctgggcgaggatagtgacgaggaaaatgaggacaggtcagatgagagcgaagaagaagaatccgatacggaagaagtacagatggatattaaggatcagagtaatactgatctagtcaaccttcgacgaacaatctacctcacaatcatgtccagcattgatttcgaagaatgttgccacaagctgatgaagatcaacctgccggccgggttggagcatgaacttccatccatgatcattgaatgttgttctcaggaacggacatactccaagttctatggcctgatcggagaacgattcgccaagatcaaccgactttggtcagatctgtttgaggcggcctttgccaagtactacgataccatccatcgttatgaaacaaacaaactacgcaacattgcccagttcttcggccacctcatcagcaacgatgcgattggctggcatgtcttatctgtggttcatcttaacgaagaggagaccacatccagcagccgtatctttatcaaaatcctattccaaaacctcgccgagaaccttggtctgcctggacttcaggcccgctttagggatgatattttgcggccgagctttgagggtctcttcccgacggacaacccacgtcacactaggttctctgtcaactacttcactagtatcggtatgggtgtattgacagaggacatgcgtgagaacctgaaaaccattccccgtcctaccgtgcccgctttgcctacgcgagccgcctctcgaagcccctcgcacaccccatctgatcgatctcgttcatctcgttcgtctcgttcgatgtgctcaacgtgcactggatctcctcactcccgccgttccaggtcaccttcgtactcccgctctccttctagggaccgcggccgttcctattctcgttccctcactccctcttcccggggtcacagctacacaccttcacgctctcggtccccagtacatcgccgtcgtgacgcatcagacagtcggtcccctgtccgtcaccgccgtcgtgacgcatcagacagtcggtcccgggcccccgcaggacgatcccgatcccgatccatttcccgtacagcggctaagcgtagtcgagcacgctcccgctcctactcgcgaagcccaagtcgcagtccctatcgatctcgtcgctcggttactcggtctgtcacaccgccgcgccgaggccaaagccctcctagccggagaaatcgcagctactccagatcagtttcccggtctgccaacacccgtacctcttcgtgagccggtttcccgaggttcaaaccaagattcgtccgaatccgtgtcacccttcatatcattttcattgtagatcttttcactagaccaaaacgagtcagcctagtgggggtctacgatcaagtttcattgcgatggctcagggtcgtggaagagtaatccacgaaaggcctatttctcaatatgtaatagagagccttttaacaagaaattccaaattagcttctcggcattttcccacagaataggtcactaattcggttttctatatcgtgtcgtaaatcaaactgcccgagcgcatcaatattccaccttgcaggaattgccggattttgctaaaacgcatgcaccccgcatagtttcgatcccccattaggaacccaaaaactatgtcaaaaatggttcgagtctgaaaggaaaccagtcgcctatgataatgtgtaatgaaagaagggttaacaatcgtatcaaagaactggacaagggcctggcaagagggtagggctaggaccaaggtctggtaggttgagttttgatgctaaagatgagtttattgaacaatgctagcgagaagatcatatggctatagtatgaagccagggtttctgtagagattatgtttagagaaaccccaagataaactgcagtgtagtgactttctagggctggaaggttccaatctttacaaggcaaatttcaatacttcacggtgtgtttattgagaggtcatctctgccctagtttttctccccttcctgtcttgattttcagcgcggttatagaacccctagattccaatacgagagattgccctacccatatcgaactaaactagctctacgcctttctaaaagatcttccacctttactgtaaggatgtttattgggtatatatttttcgtagaacactttactattattggcgaaatatcacgccaaattcctgaatcacctacgtttttgatatcaacttagcttattattgatcaatttagtcgaaaagccaaaagaaaaaagtaagttcaactatagaaatgtctgtcgagagctttgttactgaaactaccactccgaatcatcgctctggatcggttcttcgtgctggaccggttcctctcctcgggccttatcggcccaagcctcgagcttcagagggcttctggtgcaataaatcagcacactcctggtggccatcgtgtcttccagcgcactgtgtccatttttgcctctctggatcttgtaaccaatcaactcattggccaaggttttgaggctccaagtccggcggaaaggttttgcaagcggtttatacaccgcatcggcagtgagaatcgcagtgtcgatgactgtggagtgtataatgcccaggacgttcaggtcatcatggagggcgtgaccaacgagaatagtcctgctatccatatgctcaaaaagcatggcccgagctgccttccaacctttaattgcaacccccttcctgaccgcagccttcatgtcagcacatgttacaccactccatctggtatgccagtttcgaacagtgttggtggggtggacgaaatggttgacgagaacctctcctgtgaggagatccaccactaccagaaaggcaagctcacggcgattgcccataacaccgaccatctcacagtcaatggcaatggcctttcgactggtttggcttgggtttgatgggggagtcgtcataaattcattgtatctgatcacgcccccggcggggcgacgagaaggagcaagaggataactggccacggttgtgaagtgctgtttcttcagctggctatctaggtgaacacaatcttgcaggtggatcaaaagccactgctgctcttcggggttgagaatgggattggtgtggtcatcaggcgtgatgatgggattttcgtgatcctcaagggtgagaatgggtttggtgttgactgtcattttaagcgtagtttggagtagttgtattagttatagaagctcaagttgtcgctcaaatggtgaaagtagtatatggttgatgttgagtttcaatgagatagataagtttggaagggaagaaatctattagggattggagtagacaaatagaaacaaaagcgaaatataggagtcgaatgcaccaggcagacatcgcaaccatgaacagacaccgcagccgtaaaagaaggcgggcttgggatatacttcgaaggttgcaaacttttgctcatagccagtcctttcagataaactcactcgtctatatagatccatagacaggcataatataagttcaaatcggaatagtcttttctctttatagatagcgagatgagtgaatttggaacataagtcattagccatgccataccgtgtcttgttcatcgtcatgctctcgcgaacatcgaccactttctccccaacactaggtgagaacccttgccacgcataagggtccgtctctcggacttcgactgttgccattctatcgctctcacttatcgagtctgactgattctgacaagctggcagagtgtcttgacagccttggttgccggattaatgtcagtccacatggtggagggtttgaagatgaaaacagtgcaggttgcgacatttcaatttgaggagggttcgatacggctcattcccgagtacatcggtcttgccatcttgatgaatgcaattcatttctgaacaggacagaacataagaaatggaaagtcggaaagggccgaatggaactccaagcttgacccctcacctgggcattaccagagataagccagataagcgcaatttataaagctttccccctgtccagatgattttttattttttattttttatttgaaatattttctatcatgaaatatcgtttgtggttggccggcaaagagcaagatgggaatgcagatctgtgtgtgacggctatcttgacacttgaaccagcactgacaagtctacagcattcccattgaagatccggcaactggagagatcttcgcgcagtaagctaactcggagtagcgttcgatcccgtctaaccattgccagatgccacgcagcctcgccagaagatgtcgagaccgccatctccgccgcccaggcagcatataagtccggcgtatggtcgcgtgcgagtcgtcaccatcgtgccgatgtgctagagaaatgcgcaacgcttctctccgattccctcccgcagctcatctcaacagaatcaaaacagacgggtcgggtgattcgggaaatgaaggcccaggtcccatctttgacaaggtggttcaaatactatgcctccctgctaagagtcgaggagcgatccgttctaccgacgatggggaaactgcataactttgtcgaccgagtccctctcggagtggtggttcagattaccccgtttaatcacccgttgttgattgccgtgaagaagcttgctccagcgcttgctgctggaaacagtgtcataatcaaacctagcgagctgactccattgacaactctcttgctgggcaagatccttcgcgaggcgggaattccagatggcgtgttgagcgtcttacctggttatggagctatcaccggcaaagcactggttgagcatccattggtgaaaaaggtggacgtgactggtggcaccatggccggaagggcaattggtaggattgtcggtgggaatctggcaaaatacactgcggagttgggtggaaaggcgcccttggtcgtgtttgaaaaggccaacatcgatacggcgattaacgggatcgtctttggaagcttcatcgcaagtggtcagacatgtgtggccagcactcggattatagtgcaaaactcgattatggatgagctactacacaagctcaaggccaagattgagagcattacacgccgaattggtgctccaagtaacccggaatctaccatggggccactcatctccgagaagcagctacaaaatgtggagcgccttgtcaacagcgctctagatggagggaatgcggtcgctctcatcggtgcaaagcggatggtttctcaaagcccgcttgacggatttaacttcgagaggggatacttctacgaaccaacgctacttgcatccaacaacgggaataacagtattgtaaagacagatgtctggcgcgaggaggcgttcggccctgttattgtcgttgctggtttcgataccgaggaagaagcaatagcattggcaaatgacagcgagtttggattgggagccggtgtatggacactcgaccttccccaggctttccgagtttcggagcagattgacgcaggaattacttgggtgaatacccatcatcggaatgaccctagcagtccatggggaggcgcaaagtctgcgagtggagtcggaagcgaaaatggaatcgaggcttacaatgcctacacaacatcgaaaagcacaatcataaattatgcgtctcccgatgagtccttggctgcggatgactggttcggagatggctccggcaatgttagatatggttgaatggaatcatgttgctggtttctccggactctgttgcacaaatcctcgaagggatcagcatggatattagtgagtgtacatatgtagactaggtaacagacattattagcagaatacttcaaggcaatcgatcatatatcagttagaagagattatgtccagaccaatccacctctcaagtgcatttcacttcggtctgttttctacaaattcgtatcttctggcaaataaatgcataaatacataaagctagaacccagaaaaattagtaggtagtaaatgactgctagtacatactcgaatagccaagatatagatctaaccggtaagggaaatgcatgatgtcatacccatcagcccagatactagcaggttgggctttggttcatttcttcaagcatgcatcccctcaaataaattaatatttatgaaacctgttaaatcaaggaccggtactaatcttcactatgtcaatctggggtcgcagacaagaccataagcccacggagccatctggcacacaaaatggggatgaacatcggcatgcgccagaggaaacattcgaagaacctactgagcgctcaagattacttcctgcagatagtcatgaggggtttctaagcccagatgatcccgccgtgagtccaacaaacaaagctacaccaaataacacgctggaggcaaaaatcatagctaacacgagaaccaggtatcgccctacaatctatggagcgtgcgcgcggtgcacggtgcgtcagttatcgcattggcaatgagcttcatatggtggacattcctgcttgtctccatatttgtcagtccaccgatgatccacccgcgagggtcgggcttctttgccttctcatataccaccttggcgacaggatacctcgtccttggactcttatttttcgcagtgccatccaagtccatgacaatatgggccattatacttgccgttctacttttggttgatatgtttattatcctggctgcgccgcggatccgtcttgaagaaggctgggtagggattgcttctgtcgtctgggtagctttgatatctatataccaggccatccagaatcgagcagttgcttggggtaagcgcgaggaggaagagcgtcttactggtcgagaagagactcggcgctccctactggagtggattgctgttttcgctgagacgattctaatggctgccatggcgagcgctgccgtcatgttaacagccactctgatcttgcgtgctttcgactctgggctcgaggctccaggcgagcgatacttggtgcatgcggatagctatcaagttcatctcgcttgtgtcgggaacaagactgcagacgacaatgcaccgacgattcttctagaaggtggcaatggaccagtcgaacatacattacaaccgttcatcgacgatgtatacggccgtggcggtatcggcagatattgttactgggaccgaccaggattcggatggtccgacaacgcaccctcgccccattccgccggcatgtcagcggacgtgctagccgaagccttggctcttgcaggtgagacaggtccatggatagttgtttccgctggagttggcagtctttattcgaggctttttgccagtcgcaaccttctcgaagttcggggcattttcatgatcgatcccctccacgaggcatacttgggagacattgggcgacccggtcgtgggtttttgctctggcttcgtggtatcgtttctccgctgggattcgatcggcttgcgggcgctattttacgcggccgttctcgccaggaccgcgttatcggacgttcggcttaccagtctggaaaatacatcaaagcaaagctacaggaaagcctcgtggctgtcaccatgactgcctccgagatacagtcttctcgccatatccagatgggccatgctcctgtagtcgttgtgagctctggtcaagaagtccgaaagaattcgcagtgggcagagcgacaggaggatctgtctcatcttacagataatcttttgtcttgggatattgctgacgatgcaccccatgaagtatggcatactggacaaggacgggcgatattggaaagacgtttgaaggagcttgtccaagaaagtcaggtacaaagacccatgagcaagtgatcactagtttgacatctttattcgggcgttcattgggattcaaataccgtacagaaaattgccacaattgtgtcttataaaatattatctctgcgaagctgatgatgggggatatgatgctatggcctagtagtacctccctcgcctgacgcgacgtcgctacatatgaatgaacatcacttgtatgtcggtttcttacttagtagcatctatttcgacgaacacattaatccaatcgagaacttctaccccatatctagaagaaattagaaaagcccctgaagcgagagcatcagtgaatcatctaatctcaggacacttcctggagggctgtaggatgccaactggatttgaggtatattcgtaataaatgcagtaaattcgggcagagctttagcctgctataactagccgacggatccaaaacttccattctcgcatcgaatctccatttcgggtccaggaatcgaagatatctcggggaaaaggcgatgaatggcctcctcgtaacttttaaggcaacgcggtgggaaaaaccgagccgaagggtctagggggagtgcgatgaaaaccgaacggcgggaagacgaaaccgatcactctaaactagctcccttaaacctcttagcaagctggtcactctcggggctgggagatatggaccggggtaaggtggagggtggggggttgcgacgtttccgggtttgggaatccggacgagaaggctcggccggtgtgggccaggggcgcttggggggccgctcaccactctcttgaagaattgtcatcaatgtggcccatcctggggtattcacaagttgcatgccctcggcgggggacttcgttctagcgacacggcagaggagtgattcctcatcctgttcgaaaatgcgagttagcgtcacgtacactagattgaattatacacaatagaataccgaccttgctaaatgtgcctactccatgcaagaagcacaggaggtggaagtcggaaacgccttgaatagctttatctggatcaccatgggacatgagttgctgggcaacgtgtcgaagatcttggctctcgccgatgacttcccgattctcgatagggaagcgactgttggtgaataatggggatggctctgttgggaatccgtgggtgagggtgactagtaggaaatcgactgggaaactcggctcagcgctctcctgtacgcttgcaccgtactcattaattcgtcggtagaaaacttcggggatgtatcgtgtcctgcttccgagatcttcgtcatgctctgattgcaccagcattacggtcgggtctgctgagggttcgacgatatctcctcgaaccatctcaactgcagacacggatgcttggtacgagctgatagcaatcgcacctgtctcatctccactgagcacacacgttacaatatccgagccgaactgtcctgtccggctccatctcgttgacttaggattttgtgcctggagtcgtgccgcgaaggcaatttcgagtgaagacaagaagtatgaatcaatgtgccgcttacaaaccactgaaccatccccaagcccgccatcaatcaagtcagtaaagatgacaccaaccttctgcaatccgcagagacgagctacctcgtccacttcattttcgttgtgccagtcatggagtgttacgccatcgatttcgcccgtttgcgggggctcgtagatcgcttccacgacagccttgacacctagtggtacttcggtgtattcctcgtatgtaccgtacaagaaacctaatcgttgagcgcctgactttcgccagaaatcaaggagggaattgattaaatcaggggatgagaactccacatggtctaccatacggaattcctggggttgcagactgattgcgcttggttgacatttggtgcaaattccctccggccaaggcggatgccccgatgggcagtcgcttcgcactcggtaatatggttcgttgagtggaggcatgaacgaggttcccatttcgggcttgttagtcgcggcattgattttccgcaggtatgagtggaaagagagatgcttgattttcttctctttcatgttgttcgcatcgtaaggctcgagtggcatgcagtaatcacacatgcctcggggaccgtgtctgcacatcttgtagtccattccacgcttgatctttccatcttttttgtctagcagatcgtccagcggtgactgctgcactagctcccacgggttcttgactggagcggaagaacttggttgttgacggatcgggaccgtctgttgcttggggatcggagctccattgagtcggtgttctgtggtggtagatgtgttgccgttcgaggctctatcctgctgtgcctgttcctggtacccaataaagagcttatcgccatgccttcaatccagcggcgcgtgagtaattcaacatgtagatgtaaatatgaaactcaacacttacttgaggccaacctgctgaagcgaaacccctcgtaggtcttccagtagtctttcctcaccacctgtgccgatcggtttattcgagagggcaatggacgaagcttcgacgttgtccgggaggtgttctagaatctaatgccgattgccagattagattttggctctcatcctgctatcgttcccttccaactaagagccgataaatacctttttctgaagtgacgggaagagttcctgcgggctgaccgtgagtcgaaattgtccgtttcgactctcaaatcggagaagaatggaggccatcctaagcaaaactatagcacggttgaggatgaggattgagaggtagtggcgtcaccttccaaggaacacaagtggaagaaatattcgaagacaaagaaggcacatgcaagtgagaagagaagctcgacttaaagcttccttggtcacgtcacaactggcgggcggtatggtacctggctgacagaacaccccgcggtcggctttggagttttgggggaggcgtcggtaaattcgttaccacggatacagagccttgaaatagagagccagaacctggacagtacttataaatactttcaaatggaagtgataacacagaactgcctcttgtagcatcggtaccagaggcaaatttggaaaatgtgagcaaatgactgtaggaggcagaaatgtgccctgagggtactaatcgtggaatgtaactatacatggatatatcaagttgagcatctacgttacaataggctcttgcaaaagcaattgagtaatcttcttccatatatttcttccattggctagaaataattggctgttgaaaatgagaatggtatgtccgtatcatcataagatataaaaaaggcgtaaggaacgccccagtgagaacagtctagaattagagaacgcaagaagagacatgggcccaatcacaaaattgtacagttcttaggcaaaccgcatggcccctcattgctcttcttcttcttgactagctcctgagtatccttgaaaggctgctcggtctttggagcggcctccccagcaacaggagtcgagctctccggctttgactcggtactgccatgcattcactggaccttagaaacagtctcgtagaaggccttgccctgggcggtggcaatctcgagctcaagcgcggagggcttacgggaaccgtcggcagcctgtagacgggatggtcagtgagagaaatgcatcggggagtgtcgttataacttacagcgaaggtaccagcaccccaggcgctaccgccgtgaacctcgtccaagttgctgagctgggcgaatacggtcttgtagcccagaggaacgtagatgaagccgtggtgagcgagagtgctcatcgaggcaagggcagtcgactcttgaccaccaccctgagtaccggtcgacacgaagagaccggcgtacttgccccagaagccaccagtggcccaaatgccaccggtcttgtcccagaaggtcttccactgagccgggaagttaccgtaacgggtagggataccgaacagaacagcgtcgaaggcgaggaggtcagagggctcaacaatgggatagctagccttggtaggagcatgcatcttggccaaaacttcctcgttgagggtctcagcgatcctagagattcaattgttaattaactgactcgaggggcaacaatgatagcatgactgactggaagatctcggcttgaccaccagcggactcgatgcccttcttctcagcctcggccagggcctggatgtggccgtacatggagtactgatcggaaaattagtgagatgggagaggaatgcattgccattggaagacatacatagacgattgcaaccttgggagccattatgacggtttgaggattgtagaatgaacgttgtagagggaaagttgagaaaggaagagcggggaggggaggtaattatgaaggttaacaccctgtcgaggggaatatcctaggtacatcatccaccatattaattaataggcagtttatgtacctctatgattagcgagcgcaacgaagctttgcaacaagttatcagtcatcgatgacagagcaaaatggaacatgattggctgatcaggttccactcggatatagctctggccttagtgattcttactgagaactgacaaatgaagatttacgtgccgagggtgtataactatgcgtagtagagttacgaatctattagtaaaaatgatactccgcaagcgtgcagcttctaccgcagaggggggttgttttagtcaacggaattattaacactaactaatagttcggtctgtctagacagtgcctatcatgatgtcatgtaactaatcgcttctgtgtttaactctatattttggcgtacagagacgtacttgggtccgatggctaaatattaccaccacaaggaatttgggttcacgacactacgggtctatcattgctgcgaaaccagtgtggaatgttcacaccaattatgccattgagctcaagtgaaaagaatgaatttctcgcggatatttttgcgtcagattattcaatagggtatcgcgggactggcgcaagaactcataaatgaaaataaacccaagcagtccgtagaccccttgccgaagccacacctcactccatgccatgcaatgtcaccaaaaaaccccccttgcgataaaaatccatctaacctcttccacgcccgcggaagcggccacgcccaaatccaccgccccgaccacgttcatttcgccattctcgttcccgttctttttcccgttcttgttcttcacggatgagaactcgttcatgctcaagttcttcctctgtcttttcagtacgcattgtaggccgtggtagattttccggccagcgagggtgggcatcggcacacgctttcccatcagggcagaacccggccagatagaatgtacatagacgtcggcggacgtgtcgctttgcacataatggtcccaattcgcaatatccacggtcgtagtgttcgcaaggcggcagtcgtgcctcctctcgaacatgctgataaaggcaatcgtcaccattggtacagtatccagatcgagaaaatgactggcattctggcattcgtcggaggttatattcgtggaggtattcgcatttcagtcctttcttacagagtcccttgaggaaatgtttgcaaaccagcgatccgtgtgttgtagatggcgccattccggaggctgtggtagtcgaggttgtcacacgggacggagtgggatgccgatctggacaggcaggtcctaatggacagtgtccttcactataggctttgcaaacaggtacatcgctggcgagtccgaagccgaagctcttgcgcagaaagggtgtgaaagaaaagtcattgtagctgggatcgcgcgtcggctcggcggataggatttgcgcagctgcgctttcagtttcggcagccatggctcgatgaagatcgagggaagtgttgagattgaagagatgatcagtggtagtcgcgactcgcgagtcaggtgcgtgtattcgattgactatgcccacccgtgtagatgaaattgaacgttcggagggagagtataaatcacagatcctcggggtatctcgctcaaataggcatggagaaggagaatttgaggaagaaggcttagttgttgaaggttgcagagctgtctaggttgttctccagttatcgccttgaaaatcaggtggcgactcggtgtttggctcgtttgcatctcgacatgcgatattcaacaacatcgaaatcatacttattggaaaaggattatgatcagtacatcaataccctcgagtctcgtgctatttgtcttttgactatatacggcaatacactaaaggggggacaaggacgatagaaacagagtgaagattgaaaactatccaatccaatttatttgacagtgaggctgcaactgatatttcgaactatttttattgtcttacccagaatctggatatgtagtatctgtgcacaatgcatacaatctcagggtctgtcgttttcccggctagcaggccgacaatcttttctccgagctttatttgggacattataatatttaacgtatccgagatagttaactagttagttagttagttatgtaaagttgattacatatatccgtttaggattcagtttcagcaagttaatctcacatggctcccttaaattaccttcctagtattaaatagtcccgagactatcgcggctattaaaaaagaacaaatggccaagttaatcaccaggttgcctattctggattttctatgagcttgttgatcatcttcattgcaatgagcgcattcggccatttgaaaatattacttttatctttctcgtaatagccctgtgtatacttcaagatgatttgagacttttctcgtgcaatgtccctagtgaaacggaagcattccagcctcgatcaccgcggggaagtataaagccggggccacatgcatccctccccatgccctagcctcatccttcagactatcccagcgaatcagatacccctgtacccctgtaaacgctgtgattatcaaatcgaaaaagcaaaagttaactagcaaaaggccaaacctacgtcgccccatctccttgttctggttattggcttcgcaacaaaacccctttcaccggggtacccagcacaagctagattcgtattttcacgagtcatgatcgtccacaataatatattgttcatgacgatctgccgtcattgcaaaaactctcgaacacggggtggagtgcattgcctcatgcaggcgatccacgcttgtaccttagtatgaaaatctctttgacaggattttcttgcgtccgctggttagatcggaccgcaggtcatacggacatgaccggacacaatcctcccccatgtgtcttggatctaggacaattcatgactgaactccgagacagaaaccccgcatctgaccatgcaggcatccattgtgtacaagttgacaacgtacttctgtttggaaaatgctgcgcatatgcttagcccacattctccacatctttctgtgtccaattgctgattcggccatctatatggagcctagtcgggttacctgagatttgcatctgcaaactgcctgattatacacttcacctaattagtgcaagtgcaatagagagagtacgaaaaggaacgaggcgaggttccacgtgacgtattcccaaaagggaaacacacagcattgttctggggcccttttcaacttgcaattcaattctttctcttcttttctttttcgttggccttttttggaattccattcagcttcagtgctttgtgtgattccccccaatgcgcgagctctcacacttctcacctcgacgtcttgaaaatgttctcagcttccaggctcttccgccgacggggcgcggatcgtgaccccgctgccgagtcccacgtctcatacgaagtgccactgtacacaaatgcagcctactatccgaattggagaatctatcgaaaggaacctccttcatctttgcgcttgggatttatctcacatgtgttctacgcatttgcctggtaaacacagccaatcaccgccattcaagagtccgggttcgagcagatggctgacgcgctaatctcaaattggtttcttgcagggtgaaagatgacggaactgtctatgtaagttttaagttttaatcacgcacctcctctaatgtgggaatatttactgacgctgcgtcatagctgagcgatgagtgggctgatacccagatgcccgttgacggcgcagaaggttgccttagagctttcgtccaattgaagcaacagtactctaagatgagggtcatcctctctgttggtggtggcggaaaaggcagtgagaacttcgccgctgtagccagcagccattctcgggtggacactttcgttcgcaccgcgcgggaactggtggatcaatttggaattgatggaattgacagtaaggccgcgtatctttttgatgctgagacaagtcggatgtacatgactaactccatctgctatgcagtcgactgggagcacccctctgattccaagcaaggaaaggattatgttcgtctcctcgcacgtctgcgggaagtgctacccgctccgcgttacgtccttaccaccgccctccctgccggccagtgggcattgcggaacattgaccttgctgccgcacaaaaacatcttgacatgatcaacctcatgacgtacgatttcgcgggaccatgggaatccgagacgggccatcaggcgcagctttatggctcaggcatatctggtgattcggcggtttcttatgttatagggcaaggagtgccccctagaaagatcattttgggtgtcccagtttatggacgatccttcctgggcagcaacggtcctggtcagcggtatactggacacggtggcgaagatggtgtttttgactatcgcgacctaccccgaccggggacacaggagtattatgataggaacatcggtgcgtcattctgtgttggagctgatggcggtttcgtcacatacgataccccagaaacagtaaaacagaaggcggaatttgtgacctcgtcgaaactgggtggcctgttttactggcatgtctgctccgatgcccgaggaccgcgtagcttggttgagacgggatacaacacgatgcacgagatgtgagggctttcggctctttgcaaaagcaactaaatcaaaaatcagaatctcccatggcgcgctgacatcctcaaaaatggtataggtagctgtcattattttaacaattgtctcccaggttcttggttacccctagtccatgactatataggcttctagtaggaacggtaaatatagaaaatatcatgtttcagggtataaggtgaatcgtgatacggcgcttttgcgggcagatttagtactttcactttcattagacaaccgacagccgaggtttacgcagtcctataccccagggggccaaacctccatttttagcaaatactgatacattaatgcctggtttgggccgtctccttgaggatagggagaagacatcttagaaaagacacctagaaagacatccaaagaggctatcaagaatactaactaaatttggttagtcgaggctattcttgcaatagtaatacaggtattttgattcttctaccgatcccaattcagatttctaggcctaaatcaaatatcaaggtatgacatctataggactgcgtagccgaggttcatcttccccgcattttcaactgctttatcaaactcactctgcacattctatctgtcatttccccgtcgtattcacttataagaatctcactatgtcctactcgcagcccgcgacagcagatagcggctacatcaccgaccccggcccattggagaatacctacacgtcggatcccagcctccaacggacactggcatgtgagtttttcattcatatgtaattataataataatttctaaacataatccagggtacctatcatccgctgtatttcaatctgtacaaccgcatctcactcagttcggtgccgaggctatttcagaacaggttcgcgaatggagcgccgatgctgagcgcaatgtgccatatgtgaagagccataatgtctggggtaagcgatatgatcatgatcgattggtaaccacggaaggctggaaacaactgggcaaatggggtgctcggaataggtgtgatctataaatcgtatatgacatgcatgatctaacttgatccgattaggatcgtctcggcgggctatgataagggcttaggggtcgatcggcgaacagttcagtatgcgctgtgggtatttccttgtcgatctttctatgctatcgctaatgccatgattccagtacctatttgtactctccttcttctggactctactcctgtccgattagcatgaccgatggtgctgcttttattctctcatcgaaaattgacacgctgccatccacgcatcctttccatgctgcgttccaggggctgatctccgaaaaggatgatcactggacttcgggccagtggatgactgagagagccggtggcagcgacgtccaaaacaccgaaacatgggctacctactcgccgctagctactccttccggctcctccggctccgacctccttggtgatggcgactacctcattagcggattcaagttcttctcttcggcaacggatgccaaccttgctcttttgctcgcgaagactccatctggaaagctaagcacgttcctcgcgccattgcgacggaccgtggtagatacaaacggtgtctctaaagttgtatctaatggcgtcaagatccaccgactaaagaacaaactcggtactaaagaattgccgaccgccgaattggaactaaaggatatgcgtgcgcatcttcttggggagctagaccaggggattgtaacgatcgcgcctcttctcaacgtcacccggcttcatacctttgttggttcgcttgctggttggcgccgagcaatgagcatcacaaagagctttgcaaaagcgagaaccactgtcggcgaaccgctctggctgatcccaatgcatttacgactcttggcggacttggaagtaaagcatcggggtgcaatgaaccttgcgtggttgacggtcgctttgtttggaattgttgaagatcaaaaaccgtcgtctaataagctcgcgcatctccctcaacctggcaaggaagcagaggtggttttccgtaccttgactgccactgctaaggccgttatcagtaagatggccactacgggaattcaagaatgtcaggaatctatgggtggagtcggctatatggacgaggctgacgagcccgagttcaacatctctcggattatgcgcaataacgcagtcaattctatctgggagggtaccacgaacgtgctagccagcgagtttgtccgcttccttatcaagaatgacaacctgaagatatttggaacatggcttaggcgtaccttggccctgattcagagcgcaaatctgcagaatgccctgacagctgcgtggtcagctttgcgtgctcgttttacggctcaagatcccgcctcaactgttgctgatggccgtcgctttatgttcactctggcttggattctatctggtgctcttctggcgcttgatgctgaacgtgataatgaccttgtgacgacagagattgctcgacgctggatcttgagtgctgagggtggcgtgggagagcaggtgttccacgacattgttatagttaggagcactgctagcactatctctgaaggggaggaacatctgcaatgggactgtcgtattgcctggggagttgacctgccggcgaaccgtgcctctggtcatcgatccttgcaaaaggcaagctcgaagctttgaatcatgaaggttgatgccatatatagcacgcaatcttagctggcatttttgacgtttggatttctagctgatattggatcattctacatatgtgaacacgcaatcaacactttgcctgaagactagtagttttcattctttattttggtgaataatgacggatggggggaaaagacgtgctacaaatagaagcatacaagcacgagaatacctagttcgcaagccagctcctgttgatcaggcaagttgaacaataatctactaaatgaagcttccgcttagtactatattccttcagcttcgtgcggggactaggcgtcacatcagccgagtagcagcatcaaccctatgagatgcaccatgcatcgccgatataaccgacttcgaccgatttccaccgacaatcaccgaaagaagctatagtatcatgggtgtctctaggaatgcgtcagatttacccgaacgagacatttcatgcgggggttcaaaagccgggtgccgacgggctattggtgtgattatcgagattatctgctactataaatcactttataagcaatcccaattctacgtcttcaaaatcaaaaatcaacaattgacaccaccacagaaacagacaagaaatggcaagccctacgaagagcgagtcgagcgacgctctcaggcctcgtcccatctgggaacctaccatcccgcaagaccaaatacccatgaatatctatcgtgcgcatatcaacaagaagttcaatcagcagcttcgctcttctcatgatctgcatcaatggtccgttgagaatctgcaagatttctggacagacctccatggctatacgggaattattccaccattgcctccgacagtaacatccgcatttgatcctagcacgccaatggacaaggtacccaaattcttccacggagcaactgtcaactatgcggagaatgttgtgtctggtcgggacttggacaagacggctcttgttggagttcgagagggccatgatctgagtggggaggtgtggacatggggagtgttgagggagaatgtcagaaaggcaaggagtgctttgctcaagctcggtgttaaagaacaagatagggttgctgctgtcatctcgaatagcgtctggtcggtcggtttgttcctggcgactgcgagtatcggcgcgatttggactagtattgcaccggatttgggtgaagaggtatgtctcgcaggaatgggaattgctgtcgacatcggagactgattagaaatactagggctgtgtgtcacggttacaacaagtcactccacgggttctcttcgcagatgccgaatccacatataaggggaaaatgcgatcgaacgtcgtcaagatcaaaagcatcgtgaaggcattgcactcaaagccacaggtgtttttgattcctatcatcggcgcccatgagtcggcattccccagtctcgatcgcttcttgtcaatgtcacggcgagaggacaggctagggttcaaaagagtgtccttctctcatccactctatatcctatacaccagcggcaccaccggtcagccaaagtgcctggtgcacagccatggcgttattttgcagcacaagaagacatccgtactgcacaactctttgacatccgaggatgttgttttccagtatagtagtacctcatgggtcttgtggaatgtcatggtcggtcacctctccgtaggtccgactctgattctgtacgacggatctccgttatggcccagtgccaaaggactggcaaagattgcggggtaccataaggtctcatactggggttgctcccctcgctatctacaggagctcgagatgaccggttgtatcccaaagaacgaattcgatctatcctccctcagaatggtgcagacaggtggctctcatctgggtgaagaccaataccactggttctaccgcacattcccttccagtgttcatctcaccagtgtaacaggcgccacggacttggcgacttcttggattggaactgaccctgcaggtccactgtatcctggggagatccagcttcctatgcttgggcacgacttggacattgctcatcctctcacgggagcttctatcaagaacactggaagacatggcgagttcgtctgtcgcaaaccatttccatcaatgccagtctttttctggggcgatgaagatggatcgaaatacaagagcgcctatttcgagaaatttgagaattgttgggctcaacacgattgggcgagttataacccgcaaacaaaaggttggcagattcatggaaggaggtacgttttatttctctgtcggaataaatttggggaaagtgcgtgctgactgggaaaccgacagcgatggtgtccttaatccacagggtattcgttttgggtcttcagatatatactcgatcaccgaatcagctcctttcaactcggtcatttcaaccactttctgtgtcgggcgtcgacgatctcacgactctgatgaagttgtgtttttgtttgtcgtgatgcagtctggaaagccgttcacgggccaacttgctgtagagctcaaggatgcaattcgcaaaggcttgagcagtaagcatgttcctcgcttcgtgatcgaggtcaaagaagtccctatgacggtcaatggtaaaaaggtggagacattgataaagcaggtcatttcatctggccagcttcctaagattattagcagcaccgttgcgaatcctaggtctctagatcacttcaggcagtattatgatcttgaggtccaaaacaacaacagaagcaagctatagacgacatgctgtctagcctatacaatagacaatgggtggtattttgaaagagaaatgagaaaggaacttttgtacatgaaaagaaaacaagacatacaccgagaccgatttatgtatcgccaattctcgagctttgtcaagttcatatattgagtagccaggagccactccagtcaaatccagacccttcccaattattgctgaatgggtccaagccaacatcaacagaggcaaagtcgtaagtatccacaggttgtcccggcggagcgtcaagggaccgaagggcatcattgggggtttgaatatccgccatagtgcaggtaggcgagatgtccgcatccccacttggggactctgaggagtgtccaatgatttgccattgtttgcaaagttttgtatcgaatccctcaaagaaagaggctgcgtccaggtcgagagtaggcgatacacccccaaagggacccagctctcggactttctcggtcaagttgttcagtgcacgcaatggtccgaccgccgagagccacctttcggatagcttttgaagggagagcttcatgactgttaattcatgttcggcagtattctgcaggtgggtatagcgacagctagaaaggagtgacagtccagcacatagtggatagaaagcaaagacagggcccaggtatcgaagctcatcgcgaagcaggaattcctcgtaaattccagcaataaacgaagatgctaccagcgatgctgcgggtggaacgctgcctggcgtaggcgagcgatggagaatagtgagcactacgaaatacatgaccagcacttgttggatttcgaaattgcaagtaaccgcattgtcttgaggtgtcacacatgatcgtaatcttggaatgacttgttttgcccatcggtagacggcgttctcgagatcgacctgcctttggcgggagatttcttgtcgtagatgggactcgaccgtgtctcccagaagccgggatatcgtgcagtaggctaggaatagttgtgatttgaagttgttcacggggaaatcattaagtgatggcggaaggacatcgctgtcgcgtagattgatagttcgtggtcggccgacgccaacagaaattatgttgtctcgtacctaagtatgttagcccatattattccatgtgttgcagattcagggggagacacctacaacgagagaccaccacagccttctccggagaccccgatctcgggaatttggcgagggctccttgtgtagcccaatctgaaacgccattgctccagctgttcgaatccaaaacccactggtatcggtagaaacatcctcgggcccaaccggattgtaccaatgcagtaggcaggctgccacaatagaaatcaaagggtcgtcacaaccaccaaaaaagaaaagtagttttgctcgtcgatagaacacttcgctggacccatagtcgagatgagctttggaaactctacttccagcgaggaagacagactggagaagcagcattgatcgcggcgcactctcatccagccatttcgggtccacaaccggtgtccaggatgcacagtgcatgttaaagctggccattagttctgtttggactgagactggaggtaactcaaaagcaccctgattgcggagcattttcaagtcagttgctgatgctttggggctggtgtatgtggtttcgcgaccaggtttgaccatattttcatcaaacgggacgctgccgccgatatattcactgcggccgcgatagctctcctctttaataaaaggctcgccattattagcgatcacggctgtattggtttcaattggaattgcctcatgagactcgctcaaataattccgctgtgaagctacttgtgcctccggtgactcgggaggaacctgtgagctccgtggtgtctgactcaagggagcagacgttgacacattccgccctggtgataggctgttggtgaacctcttgcgctttcttgtatatggtctgaaggaagtcaattattttgattattcgacttcttttgaccgggtctacttacctgcactccacatccgactttttgcagttggtgcaggggtcgtgcgtcgcaaagtcgcacctcacctataaccgttagcaattattcgggaatagcccaatagatgatcaatgacacacctttctcttatggcatattatacatgctgtagacatggcgctattaccgacagcgtagatccggatgacgatgatggttggaggtcgagggcggggtttagccgaggcatggaaggtctataaaatgctcaacagcaacatttctgtctttttttcccactaaaagtcccctgtttttagacatggcggaacccggcagagttacaacagatacttcctcgtatcctggcatctcggtggtggcaatcaatcgccctgataggaagaatgccgtcgaccccttgacagcgaaggcgctttacgaagccattcttctttttgaaaatgacgcgaaacaaaaagtatgtgtcctaacgggtgccggcggtagcttttgtgcaggagccgacctccatatggttgcacaggcaaacaacgacacaccgagcgacaacctccaacctgtcaacggtcgcaacttagggccaatgggtccctccagactcattataaaaaaaccagtcatatgcgctgtctctggatatgccgttgcaggaggcctagagctgagcctactcgcggatatgcgtgtcgttgaagaagacgcagtcttcggggtcttttgtcgacgctggggtgttcctctaattgatggaggaaccgtccggctgcaagccattgtcgggcttggtcgtgccttggatatgatattgaccggtcgggctgtgagcgcccaggaagcgctgaccatgggactggccagccgggtggttcctaaaggagaatcattaaaagaagctattgggatagcaagacagctcatcacattccctgagttgtgtctcaacacagatcgccattcttgctactacagtgcgtatgaggcatcctcgttccaggatgcgatgacccaggagttcaatgcagggagcaaggtgatttcacaggaagccatagcaggtgcagcgaagttcagcaaaggattagggcggcatggcagcttcaaggatcacagcaagctgtgaagagaaagaggcttccattgaacgttgaaatagttcacattatcaaattaatattttggatatctaaaaccaattatcactggtggcggcagtgatgtgagagcttattatgctaatacaagctagacatgtatgttcagaaatatgccgtattgcgcgaatatagagggactgcacgacgaagtccctagttgattttcttttcggtttcgctcaagtcctccgaggtgaatttgacacgcttgccgtaaaccaatggagtacgagaaagcaaggagccaatggcatatccgatgtaggctccaacaagaatcgtaattgggaatgcctgccaaggtcggtcccttcatataccgagttagccaggtattccgcatttgaagtgcagtatgaacgtatacataccagtcaagaggaataggaatagcgccaaaccacgcccccaagcctgtaccgagcgcactgccccagaccgcatcagcgggtcgggcaatgccccaaacctcgttccatacgccgcggtccaacccgtgggcgtagatcagggccgtcgcggatagaacggccatgtgggccgcacacaggatggtctcggaattgtgggttgtgagcggggcgccgaatagaaccaggaggattgtcagaaccggggtggccaagacgaaggtcagggagaccgagaggagggccggctagaaaatcgtgttagtatcaatcacacgcaggttccgcttaattggagagatatcgcgtaccagtgaccgagaccaaatgcatgcccagctattggcgtgctgcttccgctttccatgtttgccatgtcgcgcggcaccaccaggcccagatggccgaggacttgacttcacatcagtcggggcggacgcgctcgtctctgttgatgtcgacccagcgggcggaagacatacaatcacgtagaagatttgtataagggtgagccatggtagggtggaaagaagctccttagtaggattagccaccaatgcttcgaaacgagtggcacccaatgccaaaaggagtgccggatgcgcaattgagtagatccgggctatcaacgaggggaggatgttgacgggaggggcggaaggtttctcgacgagcgtctggggtgttgaggaaggagcccctagcgcggaagaggtgtcttggggcattgctgggttcaactggcagttctctgtggaaaacagaccttgagaagctcccggttgattcagggtggaaatcggagggtcttgaatggagatgacagctcgatagtgattggctgtggccttgatgtcttaggcagaacatatatcttgccttgcccttcaggcaacaacttcatttccgagttcacaaatggattgtactacggagtaatatataactatgcagtccatgggattgtagcggccctcattacaagctcatggctgacatattattcgttgggcttcttatcattgtgaaaatgtatacagctgtctcgcattgtgttcttctcttttatctccagtataacaacatgctagcaagccagaaagacaagtcgcctacctacaaaaccgcctccagtctcagaggaaacaaagctgcactcatgaagtcgccccactttctatctcaccgattggactaacatggtgagctatcgatgggtgttgtacttttgagtatgaacatggttgcactgtgtctacctaaatgcatccagcaagtatatataagcgccccagatagatccgattaagaacacacaagaaaggcaattgcttcgttctcgatgaattttgagccgataaataccatcgggattggatataacctgacgaattcttcaggatttctccggcgcggcacttcggccgcagacacactacagctatgcagaagtgcgaaataattgaaaagcaacatccctatttttgtcatcgggttcataacagtataacagaccgatatcgcaagttcaacctaagaataggacgagatcgaaaaaaaaaaaacaagaaaagagaccaagacagaccggctgcaattgcagagacagacatacattcattccacatggcaacgtgatcaactgaaatccggaaacgggctaataatatgaaaagagcttcggaccattgcaggaaggcgggggtaggtgagagcaatgggataaagaatacatgagggtcgttcaaagggaacttgggttggcaccacaccacccaatcgagagcaagggggatggaagtgcaagagggtcacgaatacgagggcaaagcccattcatcacaaacgaagataaaagacgagaaaacaatatcatccaacgcctcgggcgtcaatgctccgtgaataagccatacccttttaaatggtcaaacaaaacccgcacaactggataaaagatagaggtgcaagccgtggaagagcaatcatgaaagcagtcatgaaaatgatgggagcgaggagtggaaacactgtgcgagagcactttgaagtagatcaagcagccgaagtggacggtcctgcgatctcttccaagatctcattagacaatggtggctctggtgcggacacggactcggtagctggcagctgagcggaccccttctgttcaatgacaggtacagacgcagatgctgcggggctatgcggctcttcgggaatagatggaggaagaccagcgccaggcaatggagacacaggcgaacgtatatgctcttccttgggctgttcacgtgggacttcgaccgaggcatgattgccatttgtcgactccgtagcatttggagaaagaggtcggttggtgagggacggctcgttctctgaccgggtggggctttttgtgcgctcgcgatcatccttaacaccatcccgaacttgagcaactttcgccttgaactttccaaacaggctctttttctcgggctctgatcctgcggaagaggtgccttgaacgccagcatccaagctcaatgggtggttggagaggtcagtgctttgatattgaccgctgccgattgaagtggtgctttgctcggctcgaggatttgttgctcctaggggtggagacgcgaaacctagtccaagttgctcgctggtgcgcttcggagaccgatgaaatcgccaacttcgacgattttcatggcgagtgacatcatcgggctgatccatatcggactgatcagtaaaagatgagcgtgagttcatagagggcgtacgcgacttgttaggtcgcagagagtggtcagtgtgatgttgcaaagtaccctctacgagagccgagttcgagtcaaaggggttctcccggttgccgagtgtcgcagcatttggaggtttcggagtggtgtcaccaacagcagcttccacggaccggttttcgtgtttaggttcaagatccgcactgtgagctggagtcgaggcatggagtgaattagtcgagctttgtgcgctcatgcttgcgctaccgggaatgcgcttcttcttcaagcgattcggctgccgatgttctctcagttcatagtcaggtggcggtgacttcgtgaagaaacttgaaagcttacgctcacgactcggagtgacaacctgtgggggtaaagtgaccgggggtgagacgaccgtgttgagattatcatgtggcctggtagtttcgttgatgacaagacgttcagcagttgccaggggcaatgggccatgggttgacgtgtgcacatatacgttgcctggagtcaatgatgcggttgattgactagggatgcgctgctcaggacgctgctcggaggtctgttcagggactggccgaggaaccggatgagatacagactcagggatcggctcaggctgctcaggctcttcgcgcactgatggcgttcgactattcgatcgagaactttgatgagaaacagagaggccggaagggttgttcgagccagtgtcattggctcgtgcataacgagcagaggtcaaaacggggcccatctttgagggtagggtgttgcttcggtgcacaccaccgccaccaccgccagtgattgaggtgggagttacagggctttgagtgttgttagaatggcgggagttgcgcgacgaaacggagacatttcgacggatactgtccaacttgcgatggctttccgtgttcgcactagcgttggataccgatcgtcgaacggtggggtgaggtcgtgcaatccctgcctcaacctccttcacagtctgctcatcggcagccgtgccgctcattccgaacaggaagtggtcctggttctcaatcaagaagatcaacacatcctgacttaacttgtattcctccggcgacatatcatgctgcgggtgggacagcatgcctggttggaagatcgcggacagattagctgacggcatgcgattctgatcggactttgaggcgaaaaccgcgagaagatcgaggatatagaggaggagctgcttgttcaatgggggcagctcgatgatgaggttctggtatgtcgaaacagcctttgcgtggtcgaacttatcggcgtcggttgtgttcttgccttctaggacctgtcgttggtagatccgcagaggttcacggaagcgctcataaaactccaatggtacgatgggttcggggagctggttcaggtatcggcgaagtacgtttgctgcatcgtggacggtgtatccggaccaatcgagtcctttgccatatcgctcgggggaatcaaagacctcctggaggtccttaatacgcttggctgatccgttaagacgaaaaatgccttccacatccgttgctatccaaaaacgtcagcgttaactcatcgagtacagcaaggtaaatgcgaacctttttcttttagaaacactccacactttgcaacaacaatcggcacgtatccataaatgaagctctcgccgtggtcgttggtcaaggagattgccacattggcatacttgatgctgacattgagcgcaatcccgaagatgccgcggggtgcctcctctgcgataaacgggtcagcgtaccagttcaagaaacgataaagaacctaaacaaatcaattggaaagcgagcaaagtccccagctccgacatgttgaactgcaacaaccatctcctgtgcgacgaggggagtataccccgaggctcagggggattgcgaaccgccgcgagccggagtagctcaggaaatatttacgcgattgcctgtattctgatatcgcattcacctgatatggcttacctttcaattcatcttttctggtgctccgtttgaactgcttccaccatgaagctaaatctcgctttgatggtggggagttggcgctgaccggatcgggtgaggtggggagagggtgaacggggtcagcacccgggtgcgacttgccgaccgtcaccatggcgagtccggaggacgactcgagatagaagcgaagatactgggaagcgaaaaagcgcaaagaggtgggtgtgtcgatcgagggattcgggaaagttgaaggggccctgcgtcaccgccctcgtgtgggaaatcctggggctgggcccaaaatagcacaggcacgttaccgaggcgaagcagaacagagatgggatttgagaataagaacctgagaacaaaggagttgagaagaaaagtaataggggatgtgagtatgtaagtctgatggatgaagggatgcgaaagggctaagaggtcagggtttcgaaagggtcaatgggggggcacgagccaagagccgaacacatatgacagagtttattctctgtattttaatgacagggacttactgatcagggggattttcattctttttgcgaacataagactatgaatagcacaatctaaccaaggttcccgggacaagttaaagatgggtcagggtcacctgtcatatagaattggatcattgtatggagtgcaggtacgcaatattctagggatttggaattctctgtcatttgctacatagaaacaccccgatggagtaaaatacagatctcccaatactagcttattgtagaatttctagaatttctagaattacgagcataaatgtgaagagccggccccgcctgcgagtagtctggaaccaacgggtcttggattgtctggaacgtgtctggaccctttcaggaataattttactggagatcagtcgcttatatcgggtttcatattttccggaccaggtaccgattttcatttttttctagtttttcaactcgcttgaccttttgagttagcgtgaccaataaagtcgacggagtatacatttagagcatatccattgtcacttgatctatggaaatggtggcttaggtacagggtacgaggcatcatatttacccttgggtctgtgcattatttccatcctatttttcagagatcgtttcagaatgcatgctctaggtacatgtagtttttgatatcttatacgtcatctggatcaccgaaaagtgtaaataacacgattaaaccagataatctttccggcctttggttgtatctttctatctatggctcaccccttggactagtcataagtcattgaggtgggattggctgtccatagcgtcatgaagtgaggttggaatatcggtgacgttgagatatcacgtggactgtaacatcgaggtttttggcatatttatccgatcggagaaactatcctgcgggacagtaggtagaaccgtagagctaacaaagcatcatgacaatacaccgatctagctggtacaatttctatgaagattgatctcccacaggcctggattttaggtaaactgtaaaattgctgaagtgaaggccctatgggctagacaactaccaagagaggagatgttgattaattgatggcctagtagctaaggcataacattttgagtcgcgtgggctattatttatccggcacccgagaagctcagaaccagcggagctgacagctaacagaatgacttgttgaaagcatcttaccatcaaaacatcttgatcttattcatctatcacaatggaagggtaagtacaccctttgaaccctctttaatttttttgctatgttttctatcccattgttcctgagggtcatcctatgagcaagccactaatactcaagtcacagacttaacgcagcggaacagcgcgagttcgcctcccgcatggagcggaagcagatgaaggagttcatgactgtatgtatctcctagcttcattgttcaagattcaagttcttattcctctgcccatgttcctccttgccatcaaccacctgtgttctcccacgctcaagatctaacatcttctctttcagatgtactccaagatggtccagcgctgctttgatgactgtgtcaacgacttcaccaccaagtccctcatcaaccgcgaggagacctgcatcatgcgctgtgtcgacaagaacctcaagagctccgcccggttgaacgagcgcttccaggagcagaatgctgccatgatgcagagcggctccatgggaggaaactaagagtctattttgataataagaaacatattgtcgatgactattctttatttttggcaacatgcattcgacaaattgggtggttggcgatgcggctcgatcgacccggttgtctccggcccgacagtggctttatctggaggtttagagggatgataacatggtcgatgacctgttggcggggaagcgaacaagatctgctcctttccgtgtacaatagtgattagcacgggagatatctaactctcctctcccggggctcaaaatacaaaagacttgaccaaataagggaaatgagatgtacgtgaccgggctcgcaaatcagagctcagcttggattatatttgtcttctcaaactcgagatagatcctttgttgctatcaaagcaatgcaatttaggcttgtgaagcccgagggtgcgtattttcttgtttattcattttccttggcgtacacattcgatgttccagtaaaactccgattccatgctataaaccgcgttgccggatggtgaataccactattctgcgactaatgcggtcggagtcgtaccgtgagaggtaatactattatatacgtatagtgcatccggacatacagggtaggatgtatacaccttccttttcccgcggagctcgggagcattcccgatcacgcgtttttctattcggaaatgccttatcgtactgcatttccccaagtgaggagaaacatatgaggggacttggaagctgtccggatctccaacttctcaaatatttgatgctttatctttcccctcattcccggatccaccccccactccttcaaaagcccgtcatttcctcttctcttcttccaccaccgtcgtattcttgatgtgagtcctttttttcccccttggcattcctgtaattgctaacagtattcgcgttagaaatcaataagcacaatggccagtacagtaggaaaggtaaattactttttccttcttctttttaactgaataaccttgctaactcggaaatctacagacaatcacttgcaaggtaagctcgatccgaccgccccgcatatatgacgtcgaccagcacagctcgaatctgtgagtcatgaatattgctgaacaaattgacaggctgccatcgcctgggaagccggtgcgcctctgtccgttgaggatatcgaggtcgctccccccaaggctggtgaggtgcgcattaaaatccaccacactggtgtctgccataccggtaagccccgccatcaaccccgccctataaaataaattgccgaaaaaaatccgatctatcagagccatgattattgacatccctcagatgcctacactctctccggcaaggacccagagggtgctttccccgttgttctcggtcatgagggcgccggtattgtcgagtctattggcgagggtgtgacctccgtcaaggtgggcgactacgttgtcgctctctagtacgttttcggctccgatctcggcgttacggtccactgacaattgtagcacccctgaatgccgcgagtgcaagttctgcaagtctggcaagacgaacctctgtggtaaaatccgtgctacccagggtaagggtgttatgccggatggtacctcccgtttcaaggcccgcggcaaggacctcctgcacttcatgggcacctccaccttctcccagtacaccgtcgtggccgatatctcggtcgtcgcggtcactcctaagatccctactgatcggtcctgtctgctcggctgcggtatcaccaccggttacggtgctgctgtcgtgactgccaaggtcgaggagggctgcaatgtcgctgtcttcggtgtcggctgtgttggtctgtcggttgtgcagggtgcggtcaagaacaaggccggtatgatcattgctgttgatgtcaatgatggaaaagaggcctgggctcgcaagttcggcgctacccacttcgttaaccccactaagctctccggcaagaccattcaggagcacctgattgagatgactgatggtggctgtgattataccttcgactgtactggtaacgtcggggtcatgcgcgctgctctcgaggcctgccacaagggctggggtgagagcattatcatcggtgttgctgctgctggtcaggagatctccactcggcgtaagttcccccccgctattcttcaccccccagtgtatattctcctggtctaacacatgccacagcattccaactcgtcacaggccgtgtctggaggggatgtgcctttggtggtatcaagggtcgtacacaactgcccggtctcgtcgacgactacctcaacggcgagctcaaggtggacgagttcatcactcaccgccaatcattggatggtattaacgccgctttcgatcagatgaaggagggtgactgtgtccgttgcgtcgtcgacatgcaataaggacaatagtttgccaatcgatgaaaaataactgatgtgaaatatgaatttaattatttcttagatttgggtctttttaaacaagagtaagagtacaatatacgggggagcttggaactttgtatggctgaggttgtcatcaaggtcctcaaccccgcggcaccttgagggtgacctactgatgtcagctctatggatttctatatccctagatctgtcaaagaaacaaattgtagggctataatgtcaacaccgtggtaagtaaactgataactgattcaaaccgcataatcatagcataacaaagtcccagcgcatcaggctggcggtcgttgatttttgagaccttcctctctctgtttcttctatttcctctcttcgggtagatctcaaagccttgcaaatacgaaaccgtctcttgacctagatcaaagccgcgggacagagtcaaacatacctaccgcgcggtttatacttctgctagcgagagtcggaaccccaccatgtctgcaccaacgagctatggatgaagacgccaatctcggttctacttcggtataacatagctggtggcctatgataggtggtatattgactgaatatagcgccattcatgtgctgacgagtctaggaggggctgtcttctgttatcagaccctaggcccaaccccgttcgccgcggcgatgcccgcggcgatatctgggaggggtatatagtccacaatatatcagggtgtactgaatcaaactgtttcagtccttctctacattcggtctatcacttctgctttgcctgtcttatactggagaacaagtctcttcaccaccaccactactacaaccatacaaccataccaccacactccaaaacaccgtgcaatccccaaaaatgacagatccaaacccagtcaccctaccagcccccttctccacaatcccccgaacccccctcctgctaggcccctcaccaatccaccccctcccccgcataaccgcggatctcgccaaaaacaacccccacccactcgtaaccatctacgccaaacgcgacgacctaaactccgcgtacgcctacggtggtaacaaaacccgcaaactggagtacctgctggccgacgcccaagcccaaggctgcacgacgctagtctccatcggtggcgtgcagagcaaccacacgcgccaagtggccgcggtagccgcgcgctccgggctcaaagcccgtctcgtgcaggagcactgggtcgactggacggacccgggctacgagagcacgggcaacatccagctgtcgcggctgatgggcgcggatgtgcggctcgacccgtccgggttcggcatcgagcacaagaacaccgcgcaggcggttgtggagcaggcgaaggcggatggggaaaagccttactatatccctgctggtgcgtcggaccacccccttggtggacttgggtttgcgcggtgggcgttcgaggttcggcagcaggaggtggagatgggggttttctttgatacggtgcttgtgtgtgctgtcactgggtcgacttttgctggcatgattgctgggtttaagttgttggagaggttgtatcctggggatgcgaagaggaaggttattgggattgatgcttcggcgacagttgaggcgactcgggcgcaggttttgcgcattgcgaagaatacggctgcgaagattgggcttagtgccgatgatattacggaggatgatgttatccttgatgatcggtaccatgctggtatctacggtattcctgatcgtcagacttgggatgcgattgagtatgcggcgaagatggaggcgtttattactgacccggtctatgaaggcaagagctttgcgggtatgatagatatgatccgtcgtggggagatcaagggtggaaatattttgtatgcgcaccttggtggacagttggccttgaatgcttactccgaccttggtcgggttaatgaatagaccaacgaatcaagagatcaatatgcttaactagagaatgaaaatgttacataaatctacggctttttgaataactaggaagtatagttgtagcattgtagcttgtattatttcaaacgagtgactatagttggcgcgtaaagatgatcaaactagggaagcatggacgacgtcctagaacagcttgtgctcaagggtcatatcggactctggctggagaccaacgcaggcacggaagatgttaatcaaagcggagcgctgcttgcccagggcattgatgacaggggtgccgggaggggtcaggggagccttgagcatgtaactgagaatgctcaggacgctgtggaagcccttgtagtcttcaccctcgctgtcggattgccagctgatacgggtcatcatctcggcgagcacaaccagatcgatgatcaggggcgaagccagaagcgagtcctcacaaatgttgaacaagctgatggtctggtggccacccatgaagatctcagcgtagtactcatccagagcacgcttgttgtcgccgacagcaggcatgtacttgatgacgacagtgtggtcggggtgctcatccttctcatagagaacgtggttggccgcgaccatgtcatccacaacgttggacttggagatctccttagagcggaactgcttctgggagctcaggttcttgccgtcgttgttgcccaagtggttgtagctggcaatggaggtaagcttgataccagcgttgatcaggaagtcaacgagagccgacttcatcttggtctggccagacttgaagtcatcaccgccaatgaaagcacgacgctgctcggccaactgaagggcaccagggacaaaggtgttctggggcgagccgttgatgaacggagtgtcctcgagaatcgcggccacagcaaacacggtggaaggagcaacctccagatgaccggccttgatggagtttatcaggttgtcggcagtgtcgttgacaccgggaatgatgtcggcgtaccgctcagtgttggcagtccacatgataatcaccttatccaagccgttcttagccttgaagtcgcgaatatccttctggatctgctcgacgtgagcccagcaagccttgtcgccctcgatgacattgtcggcacggtcttcctggttggcagcgataaagtcggggtagtagatactaggcagcggcttcatctcggccatctccttgcggacctggttcttgagggtgggctccagcacctgagcacggtccatggactcggcgagattgaggctgctgatatcccaaccgccaatggtcaggtcgttagggtggaccatggggagcaggtcgtggaaggggatgttgatctcctcgccggtcttagcatcagagcccaacttgacagtggagctcatgacgatagaaccgtagtagttggaggtctgcttgccatcgcgggtctcccaggagatattacgacggttggccaagataccagcagttacggtggaaccgttgtttccaccccaaccgaccagcatcatacccaccttgccaaccttgcggttgaccttgaagttgtagttggtggccttgggagtggcaaccaacttgttgtccgcggtgcgggtgatctcagtagtctgataggcgtacttcgacttgatctcgtcttcggtatagacgacattgggggactggacagtaaagagggaagattcttggcgaaccgacccgttcagcgcgccattggcagcatccgagctagcgtgaggggccattgcgttcacagcgggatgaataggcgaattgatagtagtgtgtgtgatagcgtagccttaacggatatagggtgcgcagtccgatgctcctccacggttggatgagcgtcggccgttgaacgggtggtgccgcctgaagaagcagttagcaattgcatttctggatgacgattgcctcctcctagaggcaacagggacactcacgagttaagacttgtcgcgaaaattgtggcggttgtatgtgaccactgtctcgacgagaagtgatctgacctgctgacaaggtttatacgaacctaaggtaaacggacaagaataattgaggatagagagagaagaggaaggggaggaagagagaagaagaggaagtggcatgatggtgactttatgtgtctccgcctgtctccgggaccttgtcccgtcccccggcttccccctttttctttttttccccttttagctccagagcttctcgttggcgattgatcttcttattggttatatctcaccgtctattcgaaagaagtcattgtcaagccgataccgcagtgatggccttttcgatgttcccgactacaacaccacttctttgtcctctaaggtactaaccttctcgggtccatagttacattatgatcagcaacttattcataaatctccagtttttttgtgctgacagctactggggctcccgaggtccgcttccggcctcgggcttctgcctggccgagggatttatttccaaatacgaatttcggtgacgtgattcagtctaggttgtacattttgtgataactgtatttgaattctcaatacaacgcaagcattgcattgcaattgcacttgaggttataacataccggggtatacgtcaggccacgagccctcggctgaaccgtgctgcacatctgcactgcacatcggaggggtcgactccgcggggcagaatagcggtcagccatacgctcaaccttggaacgttgcttggcattggattttgcttcattggaagttttatttttcttgatagctgatcattcacttcatattatatgtggattatcctggactcagaaaggaattgcgcaggatagagagtaaatggttgccgagcacaggttgggagacatagccctgattaacctaggtagacctataaccttacctagaactttaggatattgtcagataaacttacccctttttgtggtcctttggaataattagttattcacatcctacgctgaactttaggcaaacattcctaattgaatgcttaactataggcttctaaatccacaccgcctttgtgctaaactcacatagtagcaagacagcagagcaggtacctacaatttgtatgggtgtccaactttattatctcgaggacggagtacggagtagaatccgccacgataatggatctcgagatgttatcagagccccacagcagcaataccttcgaaatttcaacccgtctacttctatcagcctccctcacaatgaccgtcaaagcttgtgtcacaccaggatgtgccaaaactggcatttgggcctgcgcaggatgtgagccacccaacctaaagcctggcactgcggcagagagtgccagaaggccgacttcaaaggccacaagctcagctgtggtcctacaattccataccactgcttcctgatcagtctaatgcggcctacattgagccattccacctcaactcttaccgaaattggggcctcgaaatgaaggagctcaaggaaaggcttggctggccgcaggctgatgaggctggaaaactctatcccgagaagaacattgatacttggtactactacatgtatcaatcggccggtttcaacctccccaagaacaagcttgccagtcaatgcctgggacgaaccgtgaagggcgatgtagctgtcgtcagatcctcgccggatgatgtcgatggttacgacgagtccttttccaaaatggatttggtaaggaccatcgattactacaagactgcaaactctcgccaggtgttccagcaacgagaacactcgcgacttccgcgcaaaatggggatgccaggggacttttgaaaggggttccccatttcaactcctagggtcaccgaccttagcaatgttgtgtccactgtctggtcgtgtcgcttcccatgtatacttgtatcatttgtctttttgtcttgctaaactgtgttgttgctgctttatgtctccgttgttattgaacgggcgtctcaaaagtcttttactgcgaaaacatattccggccttctttgaaacaaatcttgtctgcagttcatgaagatatccatattgctgttatttctggttgaccaagtattcctgtaaatcccactcccgtttctattacaaaatatcacaaatcgattatgcagggtactgtggtgccctatatgcagcaggtggtttcttggggaccatcatctacattgggctggctgatgtgcttgggcgtcggcgaagtatcatactcacttcagtgacgcaaaatgatcggggctttcctcatggctagttcttttcccctttcccagttggtagtatcacgagttatcctaggtctaggcactggtggtcaactagctactatgcctctgacaatcggaagtattactagctagcacgcgtggtgcccgagtcaccccgttggctggtccggcagggccatgctgcacggaaggtattggcagctctgagggcaaactcgaatgtactatgcatcgatataaaagccagccttcgccaccgttacttgcatggtgaaagcattattatggcatcaagctcatatgaaccgcaaagacgtgacgttttttacatttgggctcgtgagtatatattggcgttgggcaaaatttcctaatactactttcggaaccaggtccttcgcaaaatacttatgtaggtacttatggagttataaattagccctattttcgataagatctcgagaagtgtcactgtcgatattgtggcaccgaattaaatccccgcagtggggaacttccccgaagttgtgaaaaaattcaacatctccatcatgcccggtgcgaagaacacccaatgctggtaagccgcctaaatgaccatagcgctttggagacttgacactgacaatatttagcgatccatgtcgtgtacttcatcataaatgtgatactaccatcccacccccgggaaccagctctctaactgtcataggcgacggcatcttgccgcaatgcagccgatgcattcgcacaggtcgggaatgcgctcgaagtaaaaaagagacgaagttccgacaggcaaagggtcggacaacgcgtactaagtttcctagcaaccaagtttggcttcggccaccacctagaggttagattccatccgatttccttgagatctagtctgacattcgaccgttatttagttgactttgtactagaaaacggaagtggccaggtggataactcgactcaaacgacgctaaatgtgctgtcacctgggaatttgcatagtcatgctgactctattcctaaaccggaaaggctgtctcccgggtcctcatataccgcccctttgccgcaacatgattccccaaactatgaagtatatacgaggagtagtgctatctcgccaacactgcaggtggtgagcacacccgaacgatcacaccggcggccatggcccttgagagatcccgaggaagcgcggctgttgcggcattttgttgaaaaggttgcaccgttcgtaagtgatgatattttgttctgtatggtgagcggcattctgactataatatcaagtttgattgcacggatcgccagcagcattttgccatccatatcccttaccgagcacgccgttgcgagacgttatttaatgcaatattggccatgtcagctcgtcatttgaatcgcacaacagggtttgacccttttgtgtcggataattactatcaagcatgcctggagaagttaattcccgcgctggatgaccacggtgttacgatggatgatgatttattggctgctactgtaatcctacgcttgctggaagagtttgatggtgggtagtggatcccttcgcacatgtgtcaagaagccagttaacgatgatcatagtaccactcgcggggtccgatattcgaggccactccttcgggacaaaggctttcatacggtgtccatcaatgatgactacaaccccgagtctccggcaggctgtctactggagtggcctacgccaggagatatacaattcccttagcctccatcaggccccagacattgatttgaggtcctttgatttgaatttccactctaactcgctgggctctgatgcaggtgattgcgcatgggcgaatcaagcaatcactcattgtgcccacgttctggtattttgttttgggaagggacctcgctcagcggctgtgcatgcagagcttacggcacataatcagcaatggagtgagactcgaccgaactctttcgacccctatttcgtgggtgaagatgtggtggtgggaactgaattccccgatattcgttacagttgtccctggcacggtacgtatcggcgatatatcttggaaaccgttcgagatatgaaccgaggctgatcgcttgtgatgatagcaatcggcaatcaatatatcgatcttgcccagattctgctttctgtgcatgacccaactctgccaacagttggacctctgcgcagaggcctgatacaggaggctgatgtaagtgtcccagtaacccgtggaccttccaatctactttcaatactcaagcggagactgacaggtggttcaggatcatatccgtaggggggtttggacattatgtggcgcttcattatccaatgcctctgtacccccagccatggttgtcggttgtatggccatccatctctgtaagcatccgaaactattttcaacatcttctagtaagtataaacgaggctgaccaatatcacaggcggcgatcgtttcacggacccacatgaacaggaccacttgatccaggttcttatccaaacggatacacttcatggttggccaacccatgccctccagggacagctttgggacacctggggcaagcgatgaaagcgagataggcgctagtgtaggtacgctaagctacatatatgtacatgttgttatggttcctattaaaatacccgggcttggcgcgttaattcttgcaactacctaaatggtagcagcgtaaccaacaaggtacgtatgttgtatgttgtatgaaatatggaatacgtatttctacttttggccaagttcagggtcttgcatgatccgtggcgttgagtgggaagtagtggccagtaataggagcgggctcggatggaagaaaaaagggccccgcggatcgccgaaaaccacaaattgattcttttccttgccgtcttctaggaatatcccgacaacctttggaatatcgccacataatcccatcaggcctgtctgccagaaggaagtctgatattgcactgtttgtgtcgaaatccattcaaaattgcagatcgagagataacccgccgatcgaatgattgcaagtctcaaacattcacccgggaaatgtgattggtgctagtggaggatcagacactaggtacggaccagtcgcattgcaagctgtgtctctttttccgtgatgtgcgtatgttccctgtgcacgcatttccttgggctccactggcggtttgggagaatggatggatttagtgatgttagtggatatagtggtatagagacacttcaagggctattattacaacaacgcactcggtatatctgtaaatagaataggcaatatggcactcatatcgcacaatatctcatatcagtatcttataataacctcagtactccgtaactcccaatgtaacccctgaagacagttacgcaccccctttccgcactggagacgctaactagactagcgtgttttccgggtctggcacaaagcgcagtcccccatacaatcacaatcgctaattctccttgagatctcaacttcagcttttcttcggacttgctctagaatagtcttccccatatctcgaggggatatggcccactgaattcgatgttcacgatctttgatggcttcaatgaacatgggcatgttgcccaccatcaaatgctccaattgtgggtgcaacgtcgagatctcctctatgggggatcatacctgcattcgaaatgagttcggtaggctttgaatatccaatatggccccggggaagtctacatgctgacttttgctccagttgcacctatcccatcaccgccttcatcggcaggattcgaatcggaccgtttcatagaggcaaaggttggccgagggaggccgccggctatagactcctccgctgcaagtatgtctcaaatcgccatgtggaaagctggagggattcccgactgacccttacatatagatcgagcattcttgcagcccagtatgccgacaccagttaacaatctccatctaccacctctccctgccagtccagtacctccatctacggtgcgcccgtatcagcacagtctgaccgatgattcggtcttctcattccccatgcctggaaacagatcgccgactgaagtgaggacaccgagtccaatgacggatcggactgcgcctaaaccacggccaccactttcgtcgcagggacaagggctgagcttgatgccagagaatataaaacttccacctagtccaatgccacctatgtccccggataagaaccatcgcagggaggagtcggcggtgagcaacagcagctatcggacctctttggctagcagtcgctacggcggttctacaacgagatcatcatccaacagcctttcgcgtggtttccggtcgtttatggacgataccccaccgatgccactggcacctctccgcacccccaatcaatcctctttctcccgtgattccaacctctcggcgggatcccggattagcaaggaagaagccagtggattcgactttggtattccagaagcccaaagcccgattaccggactagatgatctcccggaggaacctccttcgtccaaattccaggataataccaaatatgtcgctttcaatcctgcgaacctccaccctgcggcagcgacgacagagctaggtaacgatgcaccaaggaaaagctctaacgcgagtacgacgagtgcattttccgtcactagtttcgctcgagctctcggtctggaagagcaaatgaatcactctgaaagctctggctccgattcatctccttccgatgcccgcagtggtagttccatgtccagtgttccttccgatgtcagcttgaaccgacacaaaccctccgatccgctaaatctgtcacccttggttgaagaactgcccgctcggacccgagagactgttctagaaatacctggcagtataccgagcaccatgggcgatgtccctcttattccggctgctttcttcagcccggattcacccaccgacccttcaatcaaccgagatggcttgtcgttgattgcagagaggaaacatgtgcctccgacttcgctcccagcacaacccaagcaatcgatcccccggaagccaccagcacaacgctcatttacagcacccgtaccacaagcacagccacaaacgccaccgacacccacccggtccgtgacacgttcgaagggaaagtgtaaaggctgcaatgagataatcacaggaaaatcgatatcatcctcggacggacgtctcacaggtcgataccatcgtggctgtttcgtttgctttgagtgccactctcctttccaaacggtcgatttctacgtcctcaacaatcgacccttctgcgcgcagcactaccacgagcgcaacgggtccctttgcgccggttgtcacaccggcatcgagggtcactacttggagaccgtcgagcggaaccctgcacggtctgatcgccgtcgattccacacccagtgcttgcagtgtcgtacatgtcatatccttctcaagggcgactacttcgagtggaatggcgaagtcttctgcgaaagagatgctcgccgagccgctgctgcctcccacccgccaccccctggtcctcctggtcctcctggtcgtctccgccccacactacctccatctcccctggcccagtacccaccaggcccataccatacgcctggtggaagacacggacctggatatgggcctgggcctgggcccggactccaccccggtgccccattcccccctggtggtggaggacgattccccgaacgacggactactaagcttatgatgacttgagcaaaccgtgcttgtcattcttctttcttgtgaaatcttgcaaaacgctgagttgcacattccttttttccgcatatctaccgcggtttgtattccactttcttcattcctttatatatcgcgatataccctctgtgctatctcgcccatttggctttcgctggcaatggtgttggtcgtttgttttcccctctacatcagggctatcctacatctgcatccatcgaaaatgccccattggcatgttttgtgatttttgggccatcattcgcggtggtgtatttgttgattcttcatgccgaaatgtttctaatgtactctctatcggctcggtgtttggttggcggattatctcttgtacatgatttacaactagaatatgaggacctgtgagattgatgccgaaaatgaccgcttttgaggccagaaacggctgcatttccacccgtaactttagacgtgcagcggccctcaaccgacccttttttgcccgcccgcaatacggtgatctctcgcctttatggcatttctgtgctttacgggcgactaagtgtgccatcggaacatgactctcattgaatggagggcatgggtatatgtggatgtgaccgagagcggcggcttccgagtccgacggggaccacaggaagtctgtggtcggcggtagtattcggaccgtctaagaaaccttacctatattgagcgagtggttgtatccatcctggttgccagcgatcacacgttgaaggtctattcttcctgctaactgcggtcttaacgctgcgggatagataatcatccaaccaattgagatgaaataatgatttgtctacgtcattttgaatactctgcggcgaattagacgcatcatgcagctcctcgggggatattgaaatagttgtagtttccagggcatgcgtgaaggcgtgcaatgagagggataggaaggcgaggtagaatcccacgcttttgcttctattggactgggacatgatgaactcccgatggttccatatgaaggaggctaggaaaccagaaacaaaaggagggcgtgctggttatacaagtatggatccataacaaagaacggcttccgcccccaatgtacggagtgactgcagaaaaatgggggctgactacggccaactcaatgttggaaccgactctctccatcataccatctttctaccaccgctttcctgcacttcggccaactccaaaatgaacgctatagactctgaaagatttttctggggcgctccaacttcgaacgctaagtcagtataccatcttgcgcattctttatttgctgacctcgacaaagcttctgtgagacggactacgccgtgagcagatacatcgccgagtttgtcaacagcttgacgaatgtcgtctacagtaagatactggaaagaatgtgaaattctgatctaactgatcttcatcggtaatctacggcatctacgggctacgctacctacgacggaaagcgaacaagtatggtgattctttactgaatccacgcaaatctagtctatggagtacttttcgagccaatgcttgcgtttgatgtgtgatctgccaatcggattgcggaatgtgcccggcaagtgggtctcccagctggcataatgggctgatgtgcggtcaatagttcggtgggtgtgggggaagagcagggaagacgggtcttttatatcgggagtattgaagggaggctacgagacggcgtattgatgcgctaaaccctcggaggcaaaactaactcgaaaaggcaattcacagggccgccgtttacaagtttaatggacgtaagacataatgtgtgttctaagtttgatcaaataacctaaatccatgcctcattatatcgtaaacattgatataccattgcaatcatttcgacttgtgattctcaagctctagtggctcaaccggatagaggtacacacgcttcatgatccagccgaagcaaatgacataaagcgccaccgcgatgatctccatacgttgtctcacagtgatgcggtctaaactgggatttggaacacccaatacacccgaatgttccttctcccacccatcgcagacctggcggaatcgaccgggctcgtcggagatgacgccgtcgatctcgtgtcggatacaccaacgcattaggttcggcgaattcaccgtccagacatagactttacgccgggctgcgcgcgcctcatccaaaaacccccgtcctagtgggcccatcaggatcttctggttgatgttgaaggatataaggggtacttgtaggaattggcgagcatagctcacgtcgacgcagattagtgtcactgcacacagtggcaagtgctttgctcgtgcggggaggtatcgtgaagaccagaagccgagaacgattcgtcgctgccagtcggggccgcccgcgggtgtagggactgactcgatggttttggcaatcagttccattatggcgaagggttcattggcgagctgagaagttgattatgttaatgaatgatgatgtgcgaatcggggagaaccacctacctttatgtctagcaacatccagaaattctcccgacctggttgtcttaggtattctaacacatcggccaaccggggcatcggttcatggggagcttgtatagttcgcagagtttttaaatactcccagtcgcactcgctgaccttcttcttaataccgtagcagcgcatgaggcttgcatccttggatcgatgagcgtagttctagatcgggtgtatgcacctacgtgtgataacaccacgattccatcgcgggaaatatgaaggtcaagctcgagggcttgagctcctgcccgaatggcgccatcgattgacaatatagtgttctcgggatattggcccttgaatccccgatgggcgatggcttgaggcaaacgcgggcaggcgtgggcaaccggtgatcggtggaaatgagcttgcgaggacgagttaacttgataacaccgacacggagagttacacacctggaatttcatgcaaatgatcttgcgaaactatagacgatgggtcgcccattttgaaaagagttgtgagtgttgaagaagagatgccatcggagtttggcggagatagaccccgctgcacggtctaatgtggactcaggtgctcacagttgctttccagactttctattctcgtgcggaaagaggccaaaagatcgggatcagcacttaaagatctctgtctggtcttcaaccgccaggaagaaagcagccctggagctttagagaggaggctggtcgaacaccccgattactcatcactagtgaggtggatccgtctccaatttccccatgttgatttatagcctccatttcccaagttgttgtgctcattaaattgcatctgttctgcgactaagctggtagacaatggccgttcagcaatggatcacgcccttgaagggaattgacagccttagccggaccgaagctcccgttcccgtaccagggccgagcgaagtcttggtagagatccgtgctgtctctctgaactaccgcgacgtggaaggtaagtcgcccaccaagaataaacatgtaggacatatgctgaaaaagtctttcaaagtgaccaacggcgagtataagcatcacagaacagccaaccaggatgccaccatcgtaccctgctcggacatgtgtggggtagtgacacaggttggatctggcgtgagcaagtggacagtcggcgaccgggtgctttcgactttcctgccagatcatcaaactggccaggtgactgagaaggagcttgccaggagcctggggctgccgcagaatggtgtccttgcaactcaccgcgtgttccctgattacggcctggtgaaagtgcctagcttcatgtcagatgaggaggcggctactcttcccatcgcttcagtcacagcatggatgtctataaatggtttgcgaccgatggggcagagcggcgggaaggatgaatatattttactccagggaaccggtggtgtggctattgccggactacagattgcgaaggccgctggcgcgaagggtgggcaatcggattattaccgcttataagacctaatcgctgatcttgcaaacagttattatcacctcctcgtctgatgctaaattggagcaggctaaagagctaggcgccgattttaccatcaactaccgcaccaaccccaactgggaaatcgaagtgatgaaggtgactgagaaccacggtgctgatatcatcttggaagttggtggcgctaaaaccttgcggaagagctttgattgcatcgcttttggggggttgatcgactgcattggctatgtctcaggcaagatagatgccgatgaggaccgcttgaacgtcaatctgctggctcttcgtcggacggtcaccctcaaaggaattatcaacggcccgaaggatcggtttgaagagatgatacggttctacgaagaaaatcagattcacccagtagttaaccgggtcttttcatttgccgattccaaggaagcattcagatttctggaaagcgggagccactttggtaaggtagttatcaaagttcaatagagccctagggctctaatggtgtcgaatctcattgtcgaattatcattcactcctgattgccacttggcttcattatcccagcgccaattcccagatcttctcccatttccttcccagccaccgtcaatttcttgcaatcctgcagcacgaacaggagacgggcccattctgtcccgctggtattgcgccatccatgcatcgtagcccgctgcacagcaacatctcctctgttcatgatgactggctcgctatcttccaaaatcatttcaacctgcccctcgagtaccacgccgtagtcgaggctctgcgtccggtgaacgacagcagggttgttgggcgcgaagtccacaatgcggcatacggttccaccagggttaacgagtcccagctggccggattgtgtcaatgtctcgtgggtcttgatgtccgcgtcgttgttgagatccggagggaattggctcgtataaacaacattgaatgccatcttgcctttttcaagtgatacccattcagccggtgtcgacgaatgtatcactgccttcccgttctcgttgtgacctgtgatatgccgagtgactacccgcaaaggcgacacttcactgggattggaagccattgtttataggacacgaagtggaaatggaggtatgaagctgttgaaatcaatcaatgtgcggaatacaatgtgtgccctcggatgattatatagtctcactccacgtgacacggggcggtgcatgtcagcttgaacagcggtgagctggatggaaccgcaatggcttacgagtatccttggttggatgtgggcgtgttcgaaagcgaccatcacgtcagacctgattagaagattgtcggttcggttgccactttcggcgctgactgcgatcccgtagctcagatcgggcgcacaaaagaaaaatccaagagacaaatgttgcagacgagttcaactacatcgatataagccaggaaccctcccgggggagcttcaggattcttttttaccttggtccacaggtaggactaccagcaccaccctaattcgcacgcgaggcccatatccatggctgggtatttagaggattgtgatgattccaagggagtaccccttgcttttggaggttcgatttctctatgccgactctttgccgactctgacacacattcggccgacgaagaatccctcgatgatatgtccaacgcgcatttcgtcgagtcgtgcacatatagacaatcaccaggcagtctggctttgcagttaagcatgcctcggtttgaccgtaacctcagcaactgcatagaagcataaacgcctcgtactcgagatggcgacaccacgctcgttccagcgcgctgctcgtgatcccaccaggtaccaccatcagcagagcgccggcatgccgaggaatgcctcgcaatgcttatattaaggagtcggttccgatttgagcggtggagagtttatgtgaaccaatagcttgatgcaatctaatctaacacgagaaaaatagtgagttgatacaccagagttggggggcgtgggggtgtgggggttcttggacgacggaggttatagttatcttggaatcagatatggatggatgtaggtaaccctaatatgaagttagactgtatgtgtcagcgagattaggaacatgaggcttatggacagatgtatattcatttcgcctaactagatatagatgtgatgtttcaaccttgcttttacaaaaaccatcggaactcagcagatgcaggcccatctctcattcgctccgttggaatatcccgtgcccggatcgtggttccatcacgacggtcacgtcgcttgttatctagccacatgtagagtgccagagaagccgtcaagaaagcgccagtagcaccgaatgcaccaacactgattagtgcgggagtatacttaggcgcatcctgcttccggaacaagttgctgctcactaagcccatcaagttggccaatggcacgccgatactcgtcaacagtacacggcgaccctcgtgggcgatgttgttattataccaggtgctgagaatcacagatggggcggacgttccccaggtcatcatgaaggttgcgaagtaagcgacgtggatgtttgctgggacatcgtcaatggatgcgtagatcatgaacccggagaaagtgagcaggaagcccagaacaatgaatggcgatcggagtctggtccagtcagaggagaaaccgagcactagcaacatcactgctcctgtcacattgggtgcaacggtgtacaggttggttttgacggtgggaaaacccaatcccgcgatgatctgcggcatgaagagcgcgacaccctgcaaaggcacaccgagacagatttcaatgcacaagaaggcgtatgtagtggggctcttgaagataccgagggcctcgcggaagctaaactcctcgttgaccaccgcactggagtcgacttgaattcggtggaaagctagcgccttctcctcctcggacaaaaactttgcctcggcggcgctccgtgggagatagaagaaggcaaatgcagcgaagagaacagtgacgccgccctcaatgataaacaaatagcgccaattggggatatgggatcccttgatctggaatactccaaacgcaataagtccggagaaagcgtttgcaatgttcgacgcagcgtagaaaacagccaggcgacgagccagctcaccacgacggtagaatgtggtcaagtaatagatcaccagcgggaagaatgcagcctcggacatgcccaggaaccagcgcaaggcgaacatgccactgaaattataggtggccgaagagagcaccgtgagcgaaccgaatgaaaacatcaagattggaaggacgcgggctggactgaacttctttccaagcatcgagaatggcggcgcaaagatcacgaacggaacgaaaaagatggataacaggagattgtactgattcggcttgaagtgcagatctaaagattcgattagactcaagttgctgccacttaggtccaggatctcacatacccgtgctcattccatccgtttccgcatttcccagatttcccttgtcgagggcgttgaatagatctgtcgctggtcagtttctgcatgaatgacaagattggggtcgacttacacatgattgctaggatagggagaaggcgatagtcaaacttccgacagagacgccgttcagccttgtggtcgacgactcgggtcacctcttccatcacacccgggaccgagccatagtttttcaacgtgttgggctcctcgatagtggccatggtttctgttttcttcgctgtgccatcaggcgacgatgcgcgtgctgggctcgacatactgtatccaaggtgttatagacgaagaagcgtagaaaggccaagtcagcgcaccgcctgtcagttataaaggtccagaatccaagcttcttatcaaaggagaggtggcatcccttgttctctctgagataggaagacttcgggaatgttgcacccacgcataaaggacacccccacgtttctccgcatcatggaagctttagctgaacaggcaaagatcgcctgagatagtcgcatttaggccgttggggtgcttatagtcttatctgcgggggaaaatgtaagtacatcccgcgagcttgatttgaattctataccgataagtttatgttcgtatcgccgataaagtatgcccctttctctcccttgctatcctacgaagatccgtatctcaccgatttattcccgtttctcaatctcctagacatttcttcgcataagagatatcccaattccggtgtatcaggtacagttacatccgtcgcatgacctcaccacatcgagccacgcttttggaataagacagcgaattggagtagaaaatactccaaaaaaaaacgttattcttgatcagggacctaaactttattaaaacttccatggctttctcggaggcaacattagcatattcccggaaacgggacggcgtaattatcctagcatagccaattatatattgagagccaattcgaatcacttcctgattactcttaagttaagcaattggaactgtgtggcgcattccaagtctcatgcagggccttgcacgtgaatgttatcgcagccttggcggggatagtcaggacagataacaggtacaacttgtacggagtacttctacatcgactgtccacttgaaacatttagttattcttcaggatactgacattacctaatttatccaagatcccggtaagaaagctgagaaagaagctgcatttaaccactcccccgcaatctgtctttgcggagatacagcggggaaatagaggagtcaatgtcgaaaagaatgtacccacattatccggacaaaatcttttgatgattcattataaggtgagattaaggttgtatttgaaatctaggaaaaggtgacccttgtaccagttgactacctaccaccgactatgtttcaactcatatatatatttataatctccctgcgtgctcacttagtatcttcctaccctttactagcccgaggaaaccatgatggcaagaatttccactgggtgaatatatggactgctatgccgcagttggtcgagcccactaatctacctcctgttccatttgtacgttggatattcatcatggtaatgggatcaagtaaggcaaggtctctatactgatagtggcgtgcagaatggatccaccgctgtattcaataatactaccattcgccaaaccctccaggtttcattagcagcacaggaaatccgtattcgtctctctaatgtattcgggccaaacgatctcaagatttccaatgcgactatcagcctacctgcaagacaccaggtgggaatcagagctctacagacagatacattgaagaccgtgttcttcgatggaagcccagatgtggatatcccgaacggtgggctcgttgtgtctgacccaataaagttccctgtcgaggcccaatcggctctcatggtcaacatatatctcgcagagggacagcaaggcttctccattactggccaccctggaagtagaacgacctcatacctggctttgggggactggactagcgcagagaacctcacagactcatctgttcaaagcacagatcattggtgagtctttatcccgcaaaccttacaattatcccagatccgaatctgtatctgacctctatcggatggtaggtactttatcagtggagtggaggcttgtctaccctttgagtctagtggcttcgtgatcatcggtgacagtatcaccgatgggcgaggaagcactacaaatggcaatgatcggtgagtggactgttccacggtctattcttatggcttatggatttaagttggccggatctattgctggcaagaatgcaaaaacataaacccacgtcaaatatcgccattctcaaccaggccgccggtggcaatcgtatcatacaagatggtctaggtccaaacgtgatcagccgtcttgaccgggacgtcctagcacaatctggagtgcaatatgcgatgatcttcgaaggcgtcaatgatattggcgtagctgatagtgatgcagctacgcaggcggatatcgagaagaaacttgttgcggcatataaacagatcgtgacacgggttcatgcactagggattccggtatttggtgctactattacgccattcggctcgtcgaggagctccgagtatgtacagctttactcaagtgctgagcgggagaggactcgtcaacgaatcaataaattcatccgggaaagtggcatattctatgcggtactagactttgaccaggtgttgagggatccgtacgcgccatctcagttgctggaaaaatatgattcaggagaccatcttcatcctagtgtggctggatatcaagcattggcagattttttccctctcagggtatttgaatgaaattcacatagttattctcgaatagtgggacaaaagcaatctcgagactattgtccacatatgcaaatataggtatatagttttcggaccaacagatgaaaggttcaaacttttcgctcgaaaaacagagtttctttaaacacgacgtctgaagttgtcttgaaggttgcgctttctgtaagcgccgccaccgacaagagcctgcttgcggccagggccaaagtccggaacaccgccgagagaaccgaagatatcaccgacgtagttatttgccttgataccagccgcgaaagtagtattccacccgtccagaataccctcgacaaccttgataccagcaacatagaggttcttaatagcaggctcaaatgcgccctgcgctgacgactggaagaggttataggtcgccgaagaaccgggataggggcgatcaaagtccgacgcagtgcgcatcacgataatgcgagagaaatcggtcagcttgtgcatcgaggatcggagcaagacttcgaatgtagcgttatcctcctgcgcggttgtgcaatagtcgcccgttccattagtcaacaccttggtggtattctcgaacaccgatccgaggatattgccgctgaagtacacatcggaggtcgcgacatcacattcaacaacactaggagatagggtggcagccttgtacttcccactaggggtcttgtagtgggagcggtatgcctgagcagtggcagagtcggagaggtttgccgtgcgcgcaaaattagcggcaattgtgcgtaggtcagcgttcacctcgaagacctctgtaccgtagatgctggtcggatactggcctgggaattcggtaccttgcgcaacatacccggtggaaaagttgctaggaagttcgcggatatcaatttcatactgcagcgcgacctggactgcgtaccgagcaaaggctgcggatccagtggtagctctcttaggattgacgccagcaatgcccgcgacaaagaagtaggtttgcgtgagatcaaagagaggggagaaagcaacagatgtgacagtcgcagcagcattgatctcgccttctcccgtgatgagttggcaaacatcatagtcctcggtacagaagacgtccgggaacagtggtgagagaccgggaatggtgatattgtgggaaagcaggtcgaattcggggatgttccaccaagcttcagcttcaggtgcaaactgtcgtaatctattagcgacattgcatttattttggtggaagcgcataccattgacacgataaacaccttcggggcaattgctccacggtgaccctgctgggcggtcccagtagctccggcgcataatgagctgccagcgagcagaaatgaggccgtcagagtctgaagaaggtgcatggtgaggggagttgaagatggaactctgttcttgaacaagccgaggccttttatttgtagctccgtagagctgtgaagatttggtacggaatagcccttgcgtctttcgcgctaaggatggaacattgccgatcagtggacatattggtacctgattcggagaagatccgcaccgaaacgtggagcagcttgccccaaaaacgccggagattctcctatcgccctttctgacagaattctattcgtccgaggtagatggagaacacaagccattgatacctggtttttgactggccctttgaagttgaatgtgggtcgacagtgatagggtttcacctattattttgatgactgttgcttttcaagcatcggagcttgccggtgaacgttggaagagattcagaaaaagaacgagctcgatggtttcacagttctttaagatccttgttgtggagcgttgccgagggatacttggtactcgcgttgtaccagttgacccgaatgactgctcattgtcattctgctcgaaatatcgtgtctatcgaactcaaaatctatgccgtatccgggatccatctggtcgaaggcctgcctgctccgtgttagacgatgaaaggaaactgaatggaggatgagcttacctttccggagacttgtttactacgaaatacatttcacaaaaaatagaacactcgtagatcaggcgaataaggagcattagatagatgaaacgcaagccaattccctgaagtataagtccacagagggtacatgaccaattgcaatcaatttgaacaaatcgtagtgaactacctgctgctcaatcattcagacttccaccaccatttcatgacatcgccaaacacccttgctcgtacgagccacatgatgattgaaggaaatgtcgaggacagaagaccacaagcaatcgtgtgcaaattgcggttatacctgaaagccagcataagaaaatgaagtcaaagtcaactttcccgagtccgatacgacctcaatatcctccgcatcttgattcgggtagattagggccgacaacgctgcaacaccaccgttcacaaacgtctcaaccgagttccaatcgacgtaaattgtaagctggaccgtgtccccacctgcaggatttgtcgcagtccgtgtcacgtcccaagtctgtttggcatccgatgtcaaaacatccgaagcggagccgtcagagtccctaaccaggaagagctgggaattggcgaagtcgtaaccaactgttgtgttgtaggttccatcggacttgatccggaagtaaaccgtgttgccatcatcaccatcggccttagacaccgttgcttgaataacatatgcacccccagcgagatcagcaggaagcgatgccgttgccgggtctgttgttatttcagtcccatcagcggagacagggccagcaaataagtctgcatagcctgagactggaaggctgactaacatgggagtcccattgattgtctgatacttgatctcccgcgctaaactttgctggccctcgaagtctccgtagtagggcagataggaagcataattccagctattcatccagccaatagcatagcggcttccaaatttgtcgtctggattttcccagctgacagtggcgtagaagtccggaccttcatctaaccactgtggaacgctggtcgtgggtgtaaaattggtgccatcccatgttccagaccaataggcggtacctgttgtctttccataattgtacccattcgcaccgacagcgaggacccagccacgtgccgctgcgtcgccgtcaaggttgagctggaataaatctgggcactcaagagtacccaagtcgacaccagaggccactggagaaaaggtcgagacgaatgtccaagtcttgaggtccactgatgtatagaaaccaatataggttccttctgccatcacagtaacccactgttctgtgtcgtcgtcccagaagattttgggatctcgaaaggctggtttgttgtctgcgtcagggttgggcatcacgggatttccctcgaatgaagtaaacgtgtatcccatgtcggtggaataaaatagcgactgctgctgaacaccgtctcccatctgagtaaggatagcaacaacagcattctcaccgaagccggccgtgttgttcacatcaaccacagagcttccagtttcaatgtcgcctagatccacgtcgctgacagagttgggttgatacttctgaatagccacaccctgatgagtccattgcaccatatcggggcttgtcatatggtaccattctgtcccacccgtgccggggtcggagcttatccaatcggaattccagaggtaatagagatgccattcatcccccacgtaaattgggcgttgggggtcattcatccattttgtttccggtgtgatgtggtagcttggtcgcgtctggccggaggcggaaggaaccattgcggctagcagtatagatgatgctagaaaaaggcgaggcagcagcctcttcgctgcagtgggagaactcattgcgatatgagcaaaaaaaaggttattgaaaggaagatctattggccggaatgccaaagatgacctagatagaagtttaggaacattcttgaagatatatatactatccctactatcctcctgtccttaggaatgatatctccttgcataaaacaaatgcctgaacgatcattccattgcaggagactagtggattcagtgaagtcaggtggagtcgagtggagtcaaaccgcccgtcccgcacgagtttatcggaatttcgctcagccctttttgtatttgacattggcttcttcgaaagagtttgtggttgtgccgtggtatacgccacgtggtatacaattgagttgtgccgaggctggattatatgaagtctgcttatacgaagtactatttctcaaactccgtagtactaccactgaaacaccctagtgtcccatattgtcggaggatagctgaacttggtctaaccaaatacatagtcgtattccgcatcactccgacctattcccccctgctcatgcaatcctgccaaaaccagccactgggtccactacaatatacgaactcgcagtaaaaaagaatatctgaattcagcaactagacacatgtgaaagtactgaaccccgcagctgtgaccaaaggggccaacatctcatcccgcaggtaatttacgcacccgtgatccatttcatcacatggaagtttcaacctatcattattatatggaagaagaatccggtctggggttggggagatccgtggacgagcgaagacattggttacgactcaaactcaaacgccataaggcgcactcttgaagcctcgatctctactctagtgctttagtatttgtgctttcactatataaaggatccgctaataatatgccgattggttctggaacaaacaaccacaaagttagttctccgccaagactgccagtgcaatatatcgctctacactatgttgtatatttcatttggcgccaggggctctgagttcacaaaaaatgctctgatgcttgcggtataaactcatatggttcttgccaagtagcccctgaaatacaccgtatgacccatgggctcaagtggacacttggtgtttgacagattctcataatgtatgttgtagtatagcattctttactaccggtgtttatcacgactcatagccacagttatatctatgtgcatttagtgccttctttctcatctcggccatgttgcggtatagagccagcgaatgggccctgctcgtcctcgttcctaagaagacataagcgatccagctagtccccaccgtggtcgacacgacaggtcccggcgccggataaatctcggctctggtgacatgaggtagcattttaggcagtactccgtactttgaaaagagatcctcgcccacgcgacactgccctacccgacactgccctatcagtggagacgcccgacacaaagcccagcttgccaagtggagatcgtcgacctgttctggagctagcgtttgagatttgaaccgtctcggaaaattgtcggaaagcgtggcgccgctggcgtcggcaaagcggggaaagttgtctacgtacctagaggaagaggatttggccctcccacatgacgaagtttgcgtcaacctcgggcctgtcgatgtaccctgctataccaggttctccttctcctcactcagcatacgcatcgccgcgcctatgctggtgtcatcaatgactctttttcgacacctttagtgttcatgccctgacacagcttaacaactagcgggcactggagtgcttagagagtctcagcacaaacacgattgtcgagggtcttctctttctaaggcgacagcttgaataaggtttcttaagcaaactcgcacatcctgctttatggccccggtcggagcgttcagcaggtcagcaagcgcggtggccacaaacctcttcaccaagggagcctcagtgcagctcgagcaaaggctctctgggtaggtggctgggacaggaataattcggctccaactagactgcgaaatgacgctatcgacatacttggggtgctgcattcgaatcaggagaatgtcccggctggatacgtataatcgtctcatctcgatatcggcctcaaccttcgtcgaccaaaacgggtgacatagctatgcgtggcacaatcgcgttagggccgttccagagatgttgagcgattcatcggggtttgtagtgagagacgggctaagccgcagattgacgcagtgataatagaccagagcatgccctcggcgcaggcattatcctccctagggatagatagatagtggaatctatcacatctcttttttcttttgctttttgctttttgttctttttttggttttttacgcctctcctcctaggtccacgaccacatctctgatgaatggaaaacatggagtcggtccaaattctgaccatatcctcctcaatatcctccctccagggtacagcactaagcccgatcatgggctcatcaggtgaatgactatatatgactttggctgatgggaactccatccgacgccgttcaactcatcccccgtttccggtgactagcgcaagatccctcctgctttttagcgccattccgtgatttatcattaattggcgtgcctgtctagtaatttcccccgcgcattggtcctttgattgctcagcagcaccgtgttgtgctgctcgcacgcccgcgtcttattactttcgaatgtgcctccgttgtccgttgctaacttcgtcttgccttgattctcattgcaagctattggctagaacatttgcagtagtcgactcattgtcggacccattggctcgggcaagtctacactttgcaaggcgatactcggagagattccttttcaccagggtgaaataacgctgcgcacaagggctttgtacgtcggattttgcgatcaaactacctttctattaatggaactaccaaggaaaacattataggcctctcttcggtaaacgaggaccgatatgctgaggtagttgaggcaacagctctcgcctttgactttaaaaccctaccacaaggagatgagacaaacgtgggttccgatggtatatccctatccggaggccagaggcagcgaatttccctagcacgcgccctatacctacaagccaacttacttattctcgacgacgtctttagcggcttggatgcggacaccgaagaacaagacttccgcaaagtcttttcacctgaagaactgttgaaacgccgtcaagccaccattttgctctacacacacagcgtttggcacctacaggcggcagactacgtcattgcccttggaaatggtagcgttagtgagcaaggcacatttgacgcactgatggctggtgatggctacgtccaccgtctggggttgaatggcttgtccgaaagcgagacaacgtctgaggaattgatcatcgaaaacaatgtacaagaatatttgtcgccagtggataagataaaacgggccaagtttgccgttgcccccaatttggatgagtcccggcaagttggagatggcactgtctacaagcagtacatgaagagcatgggatggctgctcgcagggtctgcagttttctttgcttttctcaggggcttcttcttagatttctccaccatctgtaagtactacacgtctttgaatacggaatttattctagagaggggttcttggaagctaaccgtacagggctcacgtactgggtcgaggacgcacaatcgcaatgctcaaagcaccattgcgcttactgggccggaatatttgcgctgtttcagatcggtgtcttgatctcgctcttcctacttggcgctcccatttggattgtctttatcaaacgcgctggcgcaaatctacacatggatatcttgaatacgctggtctgagcaccactcagtttctccactaaaactgaaattggtgtcacaacaaacttgttttcgcaagatttgaatctcattgacacggagctgccggatgctacggtcagcacgcttttttcggtaggccaccgcataacgaaccattcaggagacctgagtccaacagctaacatatggatagatcacccaagttgtcgggcaaatggctgttatgctgacggcgtctccctacttggccatcactttacccttcctcgccgccctgctgtacgtgctacaaaagttttacctgcgcatttcaaggcaacttcgattgctcgatctggaagccaagagcccactatagtaagtgaattagagaatatcgtcatgtatcttcactgccgttactgacacacgtttagcacgcactttcttgatactgttagaggcatcacaactttgcgggcattgggtaggtaccagttacccaacttcctgcttgtccgtttgatttacggtctctaatccaacgcacataggctttgtccgcgaagatatcccaaagaatgcctgttttctcacctcgagccagcgaccttcgtatctccttctcatgatacaggaatggctgaatgtcgtactcgatgtggtagtcatgctgttggcagtagggttgacaacggttgccgtgcgcttccattccaactctgctctcactggtgctgctctatacagtcttttgagctttggagtgaacctcgctggtattgttctgttttggactaagcttgaaagctcgcttggcgcgattgccagactcaagatattcaacgagacgaccaagcctgaagacacagatcgagaggacattgacgtacccgaaaagtggcctcagcccagcgtggtggaattcaagggcgtttcggcaaaatatgcgtaagaatcacaaaccacttaccataaccttggaagatgcaccactgacttattattagcgccaaagatcaggacgacgggaaaacgagccttactctccccgatagtcagctaactattggctctggagaaaagattgctatttgtggtcgtactggcagcggcaaatccagcctcgttgctctacttctcaagctcctcgatccaatatccaccacgacggagaatattacgattgatgacctgccgcttcatcggctgaaccgatccgtgctacgccaatgtatcattgcagttcctcaagaatccgtcttcttgcccgatgggtctacggttcagaacaaccttgacattgccgaggaggccacccccgaggagtgcaaggccgttcttgaatccatcggcttatgggactttgtcaagaaacgaggcggcttggccacaaggatgaatgtctcgagctttagcgctggacagcggcagctgctctcgtttggccgagcccttctcaggcgctccgttcgagagcgcaagtttggggccactgggcaactgggcggcatcctcattctggacgaactgagctcaagcgtggatcaagagacggaacgcatcattcagggcaatattaggactgagttcagagactacacggtgattatggttagccatcgattggatatggtcatggactttgacagggtggtggttatggataccggcgcgattgtggaggtgggcaagccagccgtgttggtgcaacaggctggaaccaggtttggtgatctggtaagagcaggaaacaagtagattgaatggtgttagtgcaatattcagatgaggatgtcgagataggaatatggcccccctaggccttaaacggaaccttggtttttgttatattatatataatacgatggtccgagtgatcagagcgcatcagttatagtgaatgtgactatgtatgtagcctaagcgtatcaatatttactctgagggcctctaagcacccaatgaaactgcttaaaaaggaaatccggtacaggtacatgcgtaacgtgtctgtccaaatgtcgcatataacaatagcgggaaggccagttgtggatgcgctgatgctggggctttcaagccaccgtgactacatacatttaaacgtggagcatgacgcatgtcaaacatgcctacttaggtacttagaatcgaaatcccaataggatataatgctgatccccgcagattagattgtttggttctcaacgtcatctgacgtcattttttaatataggtaccagtggatggcaaagcaataaaatcaaggccaggcacgctcacagtcgtggattactttttgtttcgagctcttctttcctgataagagcacccagttcggatacgcaccgcaatacagtcccaacagcgtctctcctcgatataccaccagccaaaaaactacgcaactcatatctacatacccaccatgccgtcaatgcacgaacgtattcgcgaggatctcctcaacaaagagcgtgctctctggacagctctcacatccgctgatccagcaccagccatctggaaactcagcaaccccgaagcctgttttctattccctcagatgaatatcatcacgcttgaggacgaggacgctttcaagaaagccgtccgaccaccctttcatcgatttgacgcctatcagttcgaggaggtacgagtcataatcgtcgacctgatggccggtgtggtcacatacaaggtgcgcgctatgcgcgggaagaaagaatatactgcctcgggctcgacaacctggagtcaaggttccgatggcgagtggacgctggcttgtcaccaggaaactttgatgtgagaggattgtttgtgtcgttgtttttgtatacacccggtttcttctatacctttcgcgatgcggattggggaagggaatatgatcttgacgagcggcgaacgtctgttttaagtgatatgatgcaatgtatcacgagtcaacgaatattttaatgccatgatacatgatcaattttatgtgaagtcctaggacagttttctagtagataaatgggggtttaagtgttggagtggtcaactaactagcatgatgattactagtgtaaatagactgcgatctacactcaaaactgtcggtagtcagactgttcctatttaatgacagtaattgcaaatttattgcgatcgatgcatattgtattgatgttctcctctgtggctgatgtatcacgtagctcagccgtggcgcagtttctaaagcaccgactctcctttctctaccgacagattttcacaagccaggggtagtcatcaatgatcaagcccgtcaggcaagaaacgacccatgacactatgagagccgcatcaaacaacaagaatcacgagcatttcaatggcgatcattcacttatttcaccgtaggatctcccgaatgcaacaaaaacaaggcctatcatgacccggttcatgaatatatgtctgtatgaatcgtttcaattcttccgatcgtgctggatcatcgattgcgacttaacgtctggttcacccagtaagcacggcgctactatctagaccgcactcgtcatggtcctggcaagtcctctgatagggtctcatgagtcatgctgtttgtgcgggcgcgaaacgtgcctggctatcatttggccttgcgggcgcatgtctggctctttgaaactcactatgacaacttcatgtaactggcggctaacagtccacagatgacattgccaggcgattagtgtcaaaatgtagtgttcactctcttcaccggtcgcttgggacattctgttgccagcattgattgacaggtagtagtcctccgtactctagcggacaacgtttctgccgatgagttgggcaaaatgtacggcttcgtgatgattctcattggcataggaacatcgggccacctgcacagctggcattctgttcgatgtaggcgggtattgtgtggcgtggtcgagagtgcttttcgggttggatatgatcctgcgatgccagatgctagagcggtctacacataccagtgaacatttacggagcgggatgggcaggattcagagaaggaagaattttcgacaccatcgcctgacgcagatccacaggtacataaacagtcaggctgtatcggaaaaacgggtataaaattccatctatgccaatgtagcaactgtcacttcgttagtgatgtcgttggttatttctgctacaccattcgaaccgctagcttcggcacgatccttctgcatgtccgcgatgtgttgtacattgcatttggaagccccagcctccccgctggtttgttgtttgccgctttccagggccagggccccgcggtattctgtcgggtggctgaaggatcaggtggggactcgatacccgatcacgatcgcttttgctgttttaggatgtatctttaagatggtaaccggtgttcctggggaggaagaagttctctaggctcgccaagaaaagattgtttcgagcatatggcatagctatcacgtgcatcgggtttgtgatatgcttcctcaacgaggtccacgatgagtttctttttttccgactaccacgttgggtaatgaatcataacggatttgcagccgttgacgaagatacgatggatccccttcttagtctcgttagctagagtatcttagatggaaggggataatgtcggaatattagatccgaatggcgattcttcggaagtaatgtctctagtatcagtgggacgctgtggatgttttgttcggccgattctaatagtctctcgagtacggagtactccgtatggcacggagaaaatcggatatcacaggataaattgcgtattggcttcgtatcccctgtctaacttcttcatgtctcacgctaacgggcccagcggggatatgcggaccatattccctcaccgcattccatttaaaattgtctgcccgaacgcgtcagaggcatcacacgcctctggtggagtttcgacgtgagaaccaaagaatgggccatgtataagactattgcccaagtttcagcagttcgtatctcggttagagaaaagtaaacaaagaaaaagactaaaaagaccgaaaagggaaaaactcaaaatatcgacaggccagatttcctaagcttagcgcaacaaaaggaccgaaagagggccgatatgcacagaagcttaaatggggccattatgaaattgaggcatcacaacaaagataaccccagactcaaaagtcgaaaaaaagttggacgttggaaagtggaactgggatgtgtaaatctaaataactggggcgagtggccttccaccggtcttctagtcgttcgccaggccaatgaagacgaggttagggaagatacactccgccttgatcaatcccgtgtgtaatccaaatactgtaacatggatttctgcactcgggcgaccggaaattggtttttccatgaaaaatcgtggggttgtctcctacttggtaggctgcatcccggtgcagaattttcattacggtattcattgaaaaagtcgcgtattttatctgcggatgatctgccctaaatacctacgggatttgtgtctcccggacgtatcctaaggctaagacaaaagggacaaacggtgctgtcaattatttctccgtccagcgggcccctgccgttcttagtttcccccgagctcctttcccatttgattcaagactcatatttcctttgattaaacatcccacggaccttctagtattcccccagactcagcgccactcgccaatgcctacccagagtcataaaacaggcgcagtgagatgtgaggtatacactcggatttctgataaccatggttgtgacgtgaaaccttacctcggatccacggattggcaagccgaaggatccggggcaaaatctttagaggcttctagcctgcccgttagtttttttaggtgcatagtctatactcattctggatgcgaaagccggaatcgtcagttgaaaaaaattctgcgatataagctcatgccaagagaaattccctcacggtacttatctctctgggatcttgacacacacacacctccctactcaatacaatggagccaattcgtcccccacagaatattgccattatcggtgctggcatcgctggtattgcctgtgcattagccatatcccaggagctttctcctttcgtaccgaatttgaaaatcactgtctacgaacggcatgatatactatcgacgtccggcggtgccatcaatctgacccccgtcgcccaacgacatctcgctcggttaggcgtgctagatgagttggaccggatggggaccgagggtggtgccgatgtcgatgccattgagcttttctccatgcgttcaggtcgggcgatcggctccatcaaattcaccgacaaccaaggaaaggggttcggcggatacaagggccgaagggtcatgcggattgctctctccgtagccatgttgaccgtggtggagcgggctccgaatgtggagattgtattcggcaagaaggtgatcgatggcgaggaattcgaggatagagccgtcgtacgattccaggacggcaccgaggcggtgggggatttgatcatcggctgcgatggcgtgcactcggcggtccggacccggtttgtggacgtcggccggtctgctgagtacacgggactgtcattcttgcaagccacaattgactcggattcaatttcatcgcccgctcacttccgcacatcatcgctcaatatctcgcgacatggctcaatgcttgccagctattgtgaccgtgattccgaacagattttcgttgctgctattgttcaatttagtcgggaagcgctcacccgctatcgactggagcccggtcaggattgggccactcagaacaaaatccgctgcgccctccgtgcggaggtaagagaccgtttcggcaagtgtgccattccctgtatcaaagaaattatcgagagcaaagcggactggatgctttatcccgtatatcaagttcgccccggaggacgttggtgcttgaatcgagttattttgctgggcgacgcggcacatgcggtatgtcttaatacaacccccctgtttgttcttctctaatggattctacagatgcccccgcgtgatgaatcggctgcgtatgcactagatgatgcgatcttgttctcacgaattctgtcaacctatcgttccgagcctctgacggaggttttcgacgcatacgagaaacttcgtcgcaacacaatcaaccatgcattcaaagaatcccgtcgtatgtgggcacgaaaccgcgacatggggttcttagagggaaaagtaaaagaatggatgatgtctttccatctcagatccaacgaaagttcacgtgaggccgcatgggagttcgacgcaactaagattgcccttcccacaccagcacccagtgaagacatagtttcattgagttcatttttgagagaccggactctatgaaagaagaaaatacaccaaaatatagcatttcacaggactgtggcggagtttaggttggcctgcatggacgtgagcgtgaatcattaatggatacccggcaattagcttcccaaatattcaatagtatacctatttcgatttttctgcagaacccttgtcttttatttatgtcaatgctttttttgggttatccccatggctggagtcacttagatacactcggctctgggacggaacaggctctaccttggtccatcccgatctaccaacatagtttaagttgaaatttcttttttaccttcctcatttattcgccttgcttcacttacagaatttttaaaccaataccggacagatggtgtaaacagatatagatcagtcattaggtggactcccttgacaagtttcccttattttctggagctcactattgtgaattgattgagagctattctgctatagaggaagatctcgaattgtgaaatccggtagactatgacacctacggaatattatcgcaagcaaagaaggtagatattttcaagagactaaactgcaacgaaagacaaaaaaaatacacacaaaatacacacaaattgcgcttctgacaaagcgattccctatttgctacatagtttctccgatgttcacttagaaggtaagtgtctgaccagcagtgccaacaacagcagccttgaccttagacgagccaagcaggctgtagctgtagggaaccgacttcagggttccagctgcggcggtgttttctccatcaccgaagtcattgccattggcgacagcataaccagagtcggtagagtagaggggcttcttgctatcaacaaaggtgtttgactcaactagaagctgagcgccatcgcgggtgttgatgccgtcggcgacgtccaggtagtagttgttgtagatgtggccagtgccgaaacggaaggaaggaccacgcgagttaaggttataccagtagttgttattcagggagacacgcagatgaccggtgtcctcggcgctgttgctgtccgagtgtccgatcagggaggccttccagtggtcgtggacgaaggtgttggacacagtgatgaagtcggcagcgtgggtcagcttgttcacattagcaatctgtgaatttttctggttccacatattgtgatttggacttacatcgatgagtccgtcatagtagtccttgtcgtgatccaagtcggacgagacatcgcagtggtcaatccacacattggttgatttttctaagaccagtcagcctttctcaatttcctagagaaataaatatcccgcagcataatgtactcacggacaccaatagcgtcgccgttagcggcaagcaccttcttcacacctaggttgcggatgatcacgttgctctcttctttgaccagactatattgggtaacaattagtatcatctcgaatccacgttaagaatcacaacatacaggccaaagctggtcaagacagctgtcgagtccttgccaaggatgctagtattgcttccaacacgaacttgtttggctacctgcgtgatggggccgctcacaacgacaaccttggcagagtcgcccgaaactgcggctgtgaaggcagcatacgacgagacagtggtagtagtgccaccagcaccacccttagtacctccgttctggctggcatagccgggagcgacctaattcggagtgacgttagagtgttgatcgtatggtacctgagcgaatcgtgcattgatactcacatcattgacacttgcgcgctttcccagattgctggttgcagtaggagctcccagtgcaaggctggacaagcagccgagcagagaaactgccatcaagttgaaaggggccatcatgaatagaaaaagaaatcttaaggaatgaataggcggactgggtctccagtatgctttgctggagtaagtgagtgttgatatcagagcattgagagtatataacgatgaccgaaggggtttatatatgtaccacccgatagctctactaggctataggagcttctgaaacacgtcacatccaccaccatcctgatcgttgaagaatttcccgtgctggataatctcttccagtccggccgaaccgaagatttaccgagatgtatacgacggcattaattctccgacgcgtgaagtatcagattgatactcccaggacctcctttgtgaaagccaagatcacatcatgtttcctctaagacacaaagcttggcatggattgatcgaagtcctaaatctggaacggacttgaaccgtttggggccaagtccggacaacccgtgtacaccctactggatggagccccttcgaatggagaacagtcgtcagcgatgagctgcttgttgatttattcgctgtgccttctcaccggaagaattccacaaatggtttgaaacatcaggagttcttgccaagagttccggggtttcaacaggatctcccgatcttggcatcagaagcgtcaagggggaagttatatttccatcaatcgtcaatcgacgagtttcggggtatacgccttaattcttttattggagttcagagttgaccaggggaaattagcgctaggattcttttgggatgttggtggagggttcaacaatacgagtaaatggcgtgatcgcgttggttaatgaaatctttgacaacctcaacgtccagatcttcagatcttccacatatccaacttagcccaaataagccctgggactctatagactatttctcatccaagttattcccggggttatctggtaagtaacggtctcgcggctgagtaatcgctgttcttggatttgcggggaaagcgaactgcgatcaaaaccacctcacttgatcgcaataggcggaatgacagagacattttcatccgtgccgatcgtcgacttcgctcggttaaacgatccttcaacgaaagatgaggagctgtcaaatttgcgtcaagccatcttcgttgttggattcctatatttgaccaacacaggattagaggtgcgagcgatcaatgcgagtgaccgaaatatgctaataattgagatagagcttaattaaacgtacccatgaaaatctacccaaactatttgccctatcggccgaggccaaggagaaatgcaacatgattaactcgccatcgtttcttggctatactcgcctcggtgccgagaccactgcaaaacaaacagacctccgcgaggtgagactatttcttttcggaacctggtgcagttctcgggcactgattttccgattttagcaatttgacttcggtacccctggcgtgagaccctggacagagcaggaccccttttggcaacggcttgaagggcctaatcaggtaggttgccctctttgaacgcatgccctgacgactcactctcaatagtacccagattatccaggcgtgcaagatctggtcgaagaatatatcgcgaagactgatagcctggcacaggcattcgtgcgcctcgtcgcagaatgcttgtccctgccccgggagacatttgatggcttcaagggtaatatgagccggctaaagtttgtcaaatacccacccgcagtgcaaagctcccagggtgttggccctcacaaggactcggcgggtcttttcacatttctgtcccaggacaacacaggaggactccaggtactcaacaagaacggagaatggattaacgtgcctcccattgagggaagtcttgtcgtaaatatccaacagggattcgaagcgatcactggagggatttgcgcagccacaacacaccgggttattgtatgttcacaataccattcatcactggaggacctttctaacatcttgctattcctaggcgcccacttctcagacgcgttatagcatcccgttcttccagggtgtgagactagacttgacgctaaatcagctgaaggaatccgctgctcacatcgtgcaacgcattccagcctctgacgacaagaagaagcgagcagttgatgtgcctagtgaattcctttctcctttgtattcttgcgtgagtggttttgttcaacgattatacgcatgggactaacggatcatagttcggcgaggctcacttgagaaatcgcatcctgagccatccggacgtgggccaacggtggtattcagagttgtatgcaaagtattctcagcaggtcctacaatagtctagggaattgaacgttgacaatcccgacacggtaaaacattgaattggggtttcaacgttaaccctgactttggggaattgccatatcctcgcctacggctttctctgcgtacaaagttcgtgttgtatcgtagtccaggctgctttcagtcaatggaatttagcattcttatttttcttcctggttctattccaaatataccaattgagggctgtctatatggtggaagtgaagtatatgaacatgggcttctattcaagctttaccacagtatcacctttgcaagaattatgcctagacaaaggctataatatcgtgtgaatcaaaatcctggtatacgtttctgcgcaaatttgaagcaaaatacaaaataagccaatctttcgaagcaatgtgcgaattcttaccgacttcagttttatcctcgctttgtgtaaccgcggggtaaatcttcgtgcccaattcttccactttcatgttccaaccatgcccgaaatgaatgctacagcactcgacgctctccggagccgtttaaagactgcgactatctatgcacctgaatcagagggttacaaagacgttttagtccgctggtcgaatactggaatgaaatatgcggtacggaaggaacataaaacataacaaacaagatgaccgactgataagttgcagggcgttgtaatccaacccattgacacgcttgatatctcgatcgcgctgtcctgggcacaacagtacgatgttgatcttgctgtgaaaggtggaggccattcaacggccggcacaagttcgagcgatggtggcctggtcattgatctgtcgcgcatgaaccaagtgacggtggatactgagcggaagaccatcaccgcccagggtggagcaacctggaaggaagtcgacgaagccggtgcagtccacagtctggcggccgtagggggcaccgtaaatcacaccggcgttggaggacttactctgggaggtggctatggctggctgagcggacagtatggtcttactattgacaatctcttgtcagccacagtcgttttagccgatggtcgtattgttactgcatctgcgaccgagaacgtcgacttgttttgggggttgcgaggcgcaggctacaactttggcgtcgtggcagacttcacctaccaggcctatgaccagaaggatccagtgtactccggccttcttggattcacttcgggtaagctcgagggagttatggatgcactgaacaattccctggcaaaacccgactctcgctttggtgcgatctgtatctttgccttggcaccagatggatctgggccgatgatcattgtaattggcttctacaacggcccactcgaagaaggccaaaagagattcgctagccttacagctcttgagccagttctgaacactcttgacatggtcccatactccgtggtgaatactctacagaacccccaagcgacctatggtgatcgaaagtctttcaagggaattttctacgagccgccattggatcctcactttgcgagagtgatattcaatgatttcattgccaagatccggagtgaaccagatctcaagacgtctgccatcattctcgaatttgtcgacatgcgcaagatttgtgaagtgccgctgactggaaccgcgctagcaagccgaaatcctactcagaatgggatcatctatttaagatggaccgactcatccaaagatctagagcaccgcacttgggcacgagaagttcagtccaagtggaaagtgaaattggatgccagaaccaaagaccagggtgtggattcgggcgtgcctcagtacatcaactatgcagaacgtgagtctgattgacagaacttgtccctcaatatatactaacatcgtacacagctggtgactcggtggtaagcaatatctacggcgaaaatcttcagagactgcaagaggtgaaagcgaagtacgacccaaagaacgttttccacaaaatgcaaccaattccaatgggcgcagacttgaaaaagtgaaaaaaaacgcggctattggctggcctaatcatttctgagacatttccgaacaatctctgtattatctttggtatctttaccatcctctacgagaggacgcaaagagatgggactgcataagaatggcatatattgtaggaatatacagttttatatacagctaggagcgtcaagagaaacaacttgaaacctagataatacataaaactcaaagccgtggaagaatgtgatacttgacagcctttacagtagtccaaccctcgagagcctcttcgcccatgtctcgaccaaatccactttccttcacacccccaaatggaacattgggactgagcatcgcccacgcgttgacagtcacttgacctgaatcgagttccttgatcacacgatgggcgcgattaatattgttggtaaagatggcagcactgaggccatgatgggaatcattggctttgaagataacttcctcctccgttataaacttggcgatactctaatttgtgccttgattagtattcaaagtggcagattcttgcatggaagcttgcttaccgcaactggaccaaagatctcctctcgcatgattgtcgcattatcaccaacgtccacaaaagcagtgttttcaacgaaatatcccctgtcacctatctgctcaccaccaaacagaagcttggctccagattgctttccttgacgaatatagtcaagaattttctcatgctgcgcacggctaacaactggcccttttgtagtggaagcatctaatggattaccggcgactgtcggagcatcagcggcggcttttttaaaagcctcgacaaatcgatcataaatggtggcctgaacgtagatacgggatccagccgcacatatttggccattattggctgtaattccaatacgagtccagaggagtgcattttcaatatcgcagtcgtcaaagacaatagacggccctttgccaccgagttccaggctgaccttctttaggttagttcgcgatgctgcttgcaaaatcttccgccctgcaagcgcactaccagtgaaggcaatcttgcgtacatccatatgttccgacagagcctggccggcgctggcaccctcgccgggaacgatgttcacaacgccaggaggaatctcggcctctttcaccagctctgcaagtctcagggcatatagtggcgataattcagaaggcttgatgatcaagacgttaccagtaaccagagcaggagctagcttccaaatggtgatcatcctaagaacatgttagacgtgaatgagtcgcttggactggtaagcttacagcggagcattccaaggcacaatcgcgccacagacacccaaaggctcgcgatgggtataggcaatgccaccttccatctcaagggtcttaccatcgatctttcctgcccagcccgcgtagtatcgcaggcagccgaccgcctgagggatgttcattccgattgaatcggtatacagaacgcctgcatcaacggcttccagggatgccagatcttccgcatcgcgctcgaccagctctgcaagtttgagcaatagctgggctttgacaggtccgggcactgttctccacgttttgaaggccgacttggcggattccacagccttgttgatatcctccgggcccgcggcggagattgttccaagttggttgccggttgatggattttccacaactagcgtttgaccggcagaggagggaacaaattcattgtggataaagagtcccgtcggaactgagagggttagcaactgttgcatctagggccaatatagacttacttgtaatttgacggccctggacgcccgtgacagtcaaactagaagacatttttattgtcaacgaatactagattcgcaacttctgtcatagcgcagactttcagatgacttttgtatctgatctcctcggaacgttccgtcccgcggaaccgtcctcgacccggcccgaggtatgtggagaccgatccccaaaagaggggataatgggttgttgggagtgatagtattctgattcagatcctcgagattgaggagagaaattacaattactgaaggccacctctaaggtattccctttgtgtgcaatctgtgggtgtgctttatcttctaattgagcgtaaactagagagggcggaaagccagaaacgtgacattctcgcgtgtgtaattatcgaaacgaagcatcgtagcatcattccccaatccgaccggactcatcctatgtatcgtttttttttttcgaaggtggcaactgaatagtaaccgtaatggacgaagataaacgatgcaagactggcctatattcgatttatccgtttaatattaccatactgacattcctgacccctgagtgaagtcttaccttgataacccaaagactggacggaggaactcacaattatgtcatctacttagctttccaaaaggcccatgctaagacgagcaagcccttgataccggccgataaccaaagaataggagaaatggctccggtgaccttggtgacccatccgccgacgatggcgcccacaagcgtcaacacaaacgcgatgattcgccggtcgcgtttcacattcctcacaagaaacagttgagggtccgacattagatcgcagagaagactggtaatcaccacggtcggcatctcattgaatcccaatgcacggctcgctacgatttgaccggcagactggagactaagaagaacaatggggatttcctgatcccatgggggtattgtctccgatcctttgccggctagcgtgctagaaacggcacctccttgaacaagcccagctgtaagcaggattatactagcctgtaacaggaaagacagcatcagcgaccctcgccgccgagcacctaggatgcgatgtagacgtgcgaaaatgaaggatccaaggatgaaacagccgatggacgtgagtgagcgtgcccagccatatggacgaaggttttggtgcgatgcacccagcccgacgaagatcgtattccctacataccactatgattagtcgaccctggcttggatgggtgacgttgtaatcttacctgtttgcatagacacaaaagtgttgtaggctatacatgttagatattccgcagttcaataaacggacctggtcttgttcctacctctatatatcgtgctatccacaagtcccgaagtcaaacaacaagcgaaaagtaagaggtcagcatgctgtggctcgagctcagccttcagagatgttgaaagtccaccgaatgcacctttgtcatggttcatcttggatgttattgactatagtgagagagaaatgaagggaaggatgaaaagacaaggagatacaggaaaccatcggaataaaatataattgacataaaaactttctcttttccgcggggattgaaggacgggtaaataaactatgagatctcccaacatttccttcccctcctctcccctggtcaatcgcatcatcatctcacttaattgatgcatcctaagacggagccaaggggcagtgaaaacccccgaagttccgttgaattctgaggaatctgcaggactcgaagcgagataaggacagccacaatcacatgtcgtgcatgacagcctgaaattcctgttagacgggccgcagaccaagccgacttcatactaatttagtctccgatgcatgcctaggatgccaaggaggacccggtgtgatgagcgttagttgcttggcggcaactttcttctccaaaattccatctgcaggcaggactcgtgtaacatgagttctcatggaggggttgatgtacgacccgctatccattatccccaattcttgtggtagccaagcgtctcaggggtttcagacacagctttccgataggaccataccagagacgtcgaggccaagacggacggatcaatggtgcatattgctgcagggcaagcccagcaatcaaccctccagctcagccttgagcacatcaatatccaattctgccataaccccaagcacgacacccagactctccataaatccattgacagaaacgcgcagcatccggttggtcgtcgccatgtatgttattttcaagacggttttacactcgtcagggtcctgtttttgcttcttctcttgcggctcggatggtgcttcgaccaccggagttccgagtgtgaaagtccgtcgcacaaaaggggatagttcggcgtcaacttccaaagcgcgcagagcgcatgatgcgagatgattgcttggaaggggaagggatattgtgctgagtcaagaggtgagtattgcttggtcttgtttttttgggagctatttcggggtggcggggggcttacagtgagtaagggaagtcgggattggtgggttgtatgagagccatgataagcgtaattcagttgggaaaagcgaaagaaaatagtccttctgaattccaaattgcgtcttccaagcagcagggatagatcagttattggagtggtgaggatgatagggtggaaattggcgatgcactcggagtcctagaggaggaattccggggggggaaatttacatggctgactcagctccacggcgaaagccgaaaggagaagtcttaacttacctaccttggcatttggtgtacacactgcacaacagtacgcgtggattcgctacacagcactacaatagcaccttttggtatgttttcgggtgatgatcttctagtttgaagagcttggcgaaccacggtctttgtggaacggtgcatttggccaagaaatcatttggccaagagacggtgacccgatatcgcggtgcagatctctcctgtgagaaggatgcaaaatgcactgcatcactttgcaatatgcagtcaccttgccaaggtgctcggattgattaaattgatgtgagaagcaagccatctgagtcaagattgtgggtcgagtttcccgtcgtcagcctatcccagtcaagctcaaaagcccgaagtagacatgcattatctagatcttggctctctatacggagatatatgtatgcaacgctattgtggctctttgattgatgggaaatatgaacacctgctccgcgactagcgctcttaatcttgcgcaatatgtcttcttcgtggactcactcagctgaggtcatccaggatcagtacgacgcgaaggaagataagccatcaggacgtcttggcagatggtggaatgttacatccctaaggaaccaagacttttgcctttggtgagatgtttttgtcctctacgagcaggcagacgcttctcttctgggattggtgtctgcatgtagcaaaattacttgcagggtatagaactcgaaaatataaagagcagcgttgtccttcgactgtagtacaagaatccaacggtccagactcaaacacatctcatttgccaaagttcaaacatgactatcacaatcaccgtcgagaaggatggatactacgaggtcaatgggacccgacaggaacctactgtctctctctatgtgattcccgcagcttccaagttgcgccgcatgctgaaagacaccaaagacctcatcgtgtgtcctggagtatatgatggcctctcggctcgcattgctatgcaggtcggctttaagggactgtacatggtaagaactctgatgtgtaacaccacatccctgtataatgtatgctgaccaaactacatagactggtgctggaactactgcatcgcgcctgggcatggctgatctcggcctggctcagctccacgacatgaagaccaacgctgaaatgattgcaaacttggatccatttggacctccattgattgcagacatggatactggctatggaggttagtgactcaggaacactagacctttatcatttagttgaaaagcattctaactctctttcaggtcctttgatggtgtcaaaatctgtgcagcaatacatccaagcaggcgtggctggcttccacatcgaagatcagatccaaaacaaacgttgcggtcatctcaatggcaaaaaagtcgttagcctggatgaatacataatgcgaattcgtgcagccaagctgaccaaggatcgtttgcactcggatattgttctgattgcacgaaccgacgcactccagcaacatggctacgatgagtgtattcgtcgactgaaggctgccagggatattggcgcggatgtcggactacttgagggttttacttcaaaagagcaggcccggcaagcagttcaggatctggcaccttggcctcttcttctcaacatggtggagaatggagctagtcctctcattaccacaaaggaggcggaggaaatgggcttcagaattatgatcttttcattcgccacgatcaccccagcttacatgggaatcaaagccactttggagcgcctcaaggcagacggagtggtcggtgtacccgaaggattaggaccacgaacaatcttcgaggtctgtgggttgatggattccatgaaggttgacacagaatccggaaacgacggttttgctgaaggggtctagtaactatttagtaactagtatggatatatgcatgattttgcatcggacaagcaacggagtttctatagctagatattcaaattggaagcaatggtcgtaatatataattccccgcataagccaagatcattctaaatctcaatcaagtctgggttgccttcataggattccatgtcatcgaccatttcaactgaagggatcactggtggaatctttttcacaatctccttttcaattgtcgaccattcgcctttttcaacgattttatataatccaggccaaaggctggcctgaacaaatccatccgaggtatcctcctctgtgagggttcgcatcttcttaccccggaaccgcaatccgtattggtaactaccccagaaaacgtatttgtcttcctggcaatctaatttatgtttgaacttgatgcagcgcgcgattatgccgtgtagctgttgcattcgctttagtctctcggtgacggcgtagcgaccgaagcaggcctctgccttctcgatgatccaattacactgttcttgtaaactagaggtttccaatgataggattgcagagctcatcgcacatcgccaatgtcgggaaatgtggctagaaactgttgttgttagaaagcgacgacagtagtgatcctccggggctcacattgtttatttatttcggaatcgactttgcggagataattactccaactttgctcagctccaagcataaattggttccaaaagaaccggtaaatcagcccggcaatttccgactgaataatatccaatgacgagatgtcaaggctatctgatcttggcgtgggatcgttcccttgttgggctggctttgctgcaaagtgggtaaacctccagtgctcaagatcgtgatagagtagacacatctcttgtttggcttcttcatcagagaaagtctcagtcccagcttgtaggcttgctatcttggtcatgaggattcggttctcctttctggctacatttgattcccggatggcattgtcgagcagctcgcctctttgacgagcctgctcctctgcaagcagccgatctcgttcaaacgtctctgctttattttctgcgattttgattcgctgttttgttcgttagataaaaataaggtagaggggccttgaccacaaacctctaggagccgttcaacctcatcacgcatggacttattatctaggtaagctaatccatttagtagataccatttaagtcgtgacggggaaagcgaaccaatagcaacctgtccccatttagaggataaatctggggacgtttgagtactcctgttcgcctgctcaggcttgggttcgtcgaaagggggccacattgcataccgatagccaagtgatgggaagtatgaaatcataaatggaatagtttcaattctattcatgacacattctccaaatcgatgacaccacaattagccgatgttgtagacatatgcctcacgccgacgctctttacggctaagcgtaggagtcaatgatctcaaagttgcgaaatctaactttcgattgaagaaacatcaccttgtctgttaaaaaaaattccatcttgtactctattttccgaaatttgataagaaagacaagacgtacaaattcaacatggcgatcgcagatgagcgaccaaaactcatagtgggtgttgacttcggaacaacattcagcgggtcagtaaactttctgttctggtagtaattaatgaagcgctgacatcatttttatagcgttgcctggggattggaagactgccctgatgatattgagctcattcagacatggccaggtggtggcaacagtgagtctacgggacaaaagagaagttcatgaaactgactgttcaatagtcacaagccagaaagtcccaacattgtgttcctacgacgacagccgaatgcaatggggttatcagactaaccggtcaattcatccgggcaaggagcagcgactcattcaaggagtcaagctcttgctagatgaaagtcaaaaattccgctacgcacctgctgctgactctcatgaaatcatcaaggacatgaaaaaaacaccaacggaggttgctggtgactacctgggaaaattagtcggccacgctcatgatgtcttgacgcgtcgctttggtactgccctgcaaactatggacttagaatacatccttactgtccccgctgtttggtctgataaagctaaagatcttactatgcaggcagctcaacaggctggcatatctgctgcgaatttgagactgttgtctgaaccggaggcggctgcagtctgtgcaattcggacaattcaaccgaatacaatcgcagtatggatctcatcataatgaattggagtttaataatctgataagattctaggaagatgactgcttgattgtctgtgatgctgggggtggaacagtcgtgagtctttctcgtatggaactggtttgataaattttagtgacactcatcttaggacataatcacctatcgcgtcaaacaaagcgacccgttgacattcgaggaagccacaaagggaactggtatttatgggaaatgtacacttttggttatatctaacaaattctaggtgctgtttgtggctcagtgatgttagacgagagatttgacgcacttatcaaaagcatcattgagaagcagttgcataaaccgctcccccagtctactgccagggctgcacgaaagtattggcaagactacatcaagcctgggtatacaggtcctctcgacgacgatgagatgtgtgacgtaggatattgggtcccagttcctggagtatcgggtatctcaaatatcgagctcagtgaggggcatttatatctagacaggtatattggatatatatatttacttcaccaacccattcgtgggccacactaattcggatacagagatcaagtgaaaggcatcttcgatcctatcatcaagcagattgagaatctcgtcgccgagcaaagaacgagcgtcaaggtagcaggtctttcgacgaaggtgagaccctaaagcgctatcaaaagaagctcaattaattccaattaggctattattctggtcgggggccttggtgcctcggggtatctcttcaagcgtctacaggctgctttcaacggcattcaaatcatgcagcccccaaatgcgtgagttctcaatctttcaaaaagtcaattcaaaacgatactgatataaaaacaggtggtctgctgttgttcggtacgtatctgaaacattcataacgcttgttttgtatctgacagctcaggggcgcggtcatccgtggacaagaagggaatcaagtagagacccgcattgcccgatgcagctatggaatttcaatgaaaatcaagtttaaccccgaaatacaccgcgcagatgagaatctcatgtggtgtccatatgaagaagtatggcaagtgcataagcgcatgagatggtatattctcaaagtgagtaacctgccacttctactgggtatttttgaagagattttgagtgctgacttgagggactttgagggaaaccccgttgccgagagtgagccgataagaatgggcttctaccgtgtggtcggccttgggcaacctttggtatttcaggactcattgcagttttgccaggggaacaaagcccccgaaacgatggattccagtatgtcccgtgtccttatattggcaatatatgaaagcggccttttactaaattgaacaggtgtcgtgaacctgtgtgaagtggaggcagatctgagcagaatcccaagggagctttttacaaagaaaacgaactccaaaggtaacgaattttaccacatcgactatgatttggttctaacgccaacttccgcatcgttgttgttcgacctgcaattcaacggtgtctcctacgggagcgtgagatctcgctattgaattccacaacggtgggctaggaaaggtatgtttagggtagctgatttgaaagggacttttgcctatgataaaacgtggctatggttttcgcaggctcaatacttgatcgcttgagattggctcgatgacataattgagaggaccgaaataaatagttagctagcaatgcaaacttgatatgcgccttccttgtgatgaagtgtagataaaaatgtgtattgaagaggattcaagtaagtccaacaacgcaggctgctgcagacgaaattcgaagtcaaccttccctgctaccctgaaaaacagccaagtgttgcaagcccgggccttccaaaatatccaagggggccacaaaagccatctgactccatgagaaatttttattctttccgccatagataaacacttcaaagcggccgacaaagtcaccatccacccacacgcgacttccatatatctcatttgtagagatagtgacttgtgatttgcgagggattatgacagccttgtgggttgacgtggtcttattaacccaaattcttccaggctggtcttcgtcaaaagcgtcagcctcagcaacagagcgaagtgggtatggccatccatcagaaacaaaagccaattcaccgtccgatgataatgtaagtgtcgcatcggaggactgcaaagaaaaaggacccgtgacgtttagttgaagggtataatccatgcccttacttccatagccgaggttatgcttatcctggctggtagttggccttgtccatgaaagcaaagttcctgatccgtgggccctttctcccggaacgcggcggtcgagattttgccccacagcttgagaggacaattgtgcgatggatttggccaaggttggttcatgcaagggaggcccacgcgcaccacaccacactcgcgaagccacgactgggatgccatcacgaatggcatagtaggcctcaagctgagtagtggcatccgggccactgtcattccaggcagccaagagagcacctagtacagcttcggtatcgggttgttcagttttgttcaccggattgaagagcccaggggtccactgccatccgtgctggtcggcgaagttcagaacacgggcgttgttgaaaaactgaggataaggggctggggtgataggcacatggttgcttttcagcgacatatatgcccaccaatcctcggagttgatgatctggtagccgttttgggctaggttaactggatctgattgtccatactgccagtgttgaattgtcacattcttgtcaatgggaatgtttgatggctcatatgtcccccaaatacgaacacttttgccagaagctgcttgtacaaagcgagacatctcgttcacgaactcaacatagtcatccgcaaattcagagtcgtactcatcggcaccgatatgcacctcctttgtgtggaaccaaggaagaaattcggtccagatggacttcatcaaaggaacagtgtccggatgcgagagattgagcaggtccctcgactctaacgcgagctcaggtctccatttcgtaactgtgagacagtgcccggggctttcgatctccggtatcactgtaacacctcgctgagcacaatgacgctggaaatcatcaaactcagcccgggatagcgtttcgttggcacgctggacaagagggcggagggcctcactttcggggtgcaaggaaaactgcgagtagacctcgttccaggtcacgtttcgaccgcggctcagcggatagttgtcggtcgcatggtagtgaaactcggataatttgaagaacgaggcgtaggtgcataaatctttcaaaaactcgagtgaataccatttgcgaccagcatctagcaaaaatccacgagtcgcataggcgggtgcatcttccacgcgaccaggttgtagggatgagcgtgtcaaagtgagttgctggaggagcgttcgcgttccccaccacatacctcgggccccggagcctcgaataaatacactgccatcttgtatttccagctcatatccctcctcggtctggcgtccactttcgtacgtaaaccggtcgggatggtctgtgcgcccgagaaatattcccgacgcatgtttgggaaactgcttgaccgtccgaagctcccaggaactgttcgttagctcctgtaaatcatcgcgaaacgtgttggcaaagtcggatgccgatggtggaagcagcgttaatccattctgatccttccagctagcgaagtcggcacttaggtagattgttcggtcggtggttgctaacgaaaagcctttgttatgaccagagccagtgttgtcaaagtgcaccgggggtaggatctgcagcgcagacgcgactgcggcaagtgagaggacaatccacttcatgtctggacattgtgatattggttacgatgtgagcccttttatgcaaagcaagggattgtatcagcgttacattcctgattgtacaggggcgtgggggtagatgttgtggggaggtggggaatttttatattggcagagtggttgttgtggatatcctacttatttttcatcttggggtatagataagaaggttgcattaaaaaacttaattgactattctttctttcctgtcatggtaactcgaagcatgaaatcacgcctcgtcgaagccatgctgaggccgagttttcatctattgattctcaatggcatatgatgcctgtttcttactttttattagtatagatagatctcttttgaccacttagactccctgtttccaagttagagaattacaagaatggcctcgttatgtcattttggtagtcttttagttagtcttcttaaaatatactaatcttcttggtacacgggacgggaaagggctaaatttgtgaacctttcctaggtatgtataaccttagatatgtggtcaatatctctttctgatccttttctattccagccgttgggtgctactgctaaatagtcccacaatagcctgctgacagcttttcagatgtttaatcgtattcaaccctcctcgatttctaagggcagtttccaaccacacacaggcccatgtcatattccataactcgttcaggagaactcatatcaaatttgcactcgttacacctcactccgtatttcctcttctttcattcttccatcaagaactcgcgttttctacgtagctcacgacaatctcattaccacaacgaaaccgaatacacataaaaccgcatcaggccgacagaaataagtcaagtgagtcttagagttcaacggtgcttttgaatatgagtgtggttgttttcgtcaacagtttcctttagtagttgggcaaaatatccaaagtcagtgtctacgttgaatttcttccagggactctcggtttatatgggtattacaatggtagcaaagatactagagctcctcggaggggactacggggactctcgattagggcacattggggatatgtcacccttgaggtcactgattagcagtcgtaggacgggtttctcacgaaccacatcgatagccctagcagtctctaacttgcggtcatttatcggccactatgattgttctagcatggagtttggaccaaaatatccgtagaacgttcgacctcagttgactaggcaacgggccaagcgttgctccggatggatgaaacaaaatacgccctgatatcgtttcttttaagccgcgttggatacctactgttggtatagaaattttttaccttagtccatcccgccatttttaactctgatgctgttgttagaacatttgagatgtgcaagcatacacgaattgggcttcatccatccagcggagaaatcactagagacttctctttctgtctggaaaccaagatatggtttgcaagccgagcctccaaaccccaccgccaaccactgagaggatatagaaccttccccgtatgcggttactaaccagcttgggtcggcgatggaagatcttcaagcgcagggtgcctaagttatactaactccgttatctccccctcaccccgacatcaaagaaacggatatcataaacattaccaggtatgatttctttccatgatattcgccgaattatcagtgaactcccactaataggcaccttttcactcatcttcaggctcatgtcattttggtcaggcctcagccggcaatttatttatgcggcgatacctaaaagcctaggtctagacactgcgcagggccaacacgagaaattattgtatgtaatgcaagcatttccccgatgattcctccgacaacgaactttgggaatcattaatcaactgacacaattccttggcgagtgttacctttacagacggactattgttgcagcaagggcggaaagtaggtgtatctgtatccaagacatcaggaattctcggtagggatcgacaaggatcgactctacgccgaggaccatagaggaccttctcagagtggcgcagccttagcggtacatattttgcgctatcccttcaatgaacggggcctggggtaccccagctaattatttaaaattattagagttaagatctccctttcaagataaaaagttggcacacagccgtgacaacatccaactgagggaaagcctcgtggcatcggaatccccacttaacctttcacccttgccgtcgggccttatttttcaaagatggcgaataccaagactgtgagctgaactacacacctagtcatacctcctgtgtgttacaatatgttgcatctattcaaacctagacagtatcttcctatgcggtgaaacattcgactagatcatgacgacctaatggatcatcgaaagagcctaatatccacttatcagcaattgaagtatactgttcaactgcatccttgatctacgatgatcaggtggtgatgtcatactcacagcaaggacaatagttaaacgtggtttcaagccaaaacaccgcccagttggcgggctggccaattggaggtaaacgaatgacatccacttggcattatcatgtattgttagcggctccatgaaaagactgattttttttggctgaagataacaacagcaaggggagaatgtctcacaccttggcatataatattgctttttcgaatgcaaacatgtggttttattctccatttcctttttgtggatctcaacttctgacggccatgaaacctcccaatgtgatcgctattgcacttctcctttttgagttgggcgtatattcctgcagcccacatatccattacaaggagaatatgccaagattggacccgtcagcaccaggcagtgcctgagctgcggtttagtcaacgtacaacatacggggtacggtatggaggatcaaccttgtgagcgccaagatctagtattcgaggctgtgttatgagaacttagtcgttggcgtgcacagataagactagtggtgaaccattgatgccgccggagatcgttcttggcgactagtcctactgcagcgcttttggggccccggacggactagtgtcggtggatacgtcgatcccttggcaatcgaagtgtacccttttgacgttttcaggggccagaacagacaatatgtactctctaagacgccatctcaaccaggtaattgcatatcaagccgagaatcatagggcaggtgagtttaaataatccgatgacaggtcgcaatggtcccaaatttaaattcggtcgattgccgcgcgctgattctgcacatgtagccagtcaatgccataacgcataaccatgctgccaagaaagaatgtgaggaaatgctgcggattgctccttggaatcgagaaatcctaggaatcaggtcttgacggattccgccaggccacggtagatcctgaacccgcaccgtctaatgtcgtattatagtttgatttataatgggatctggggttgaattacgcatgcagcggagataattatagtgccaagataacgcccagattctgctaacatggatctgtgagatcatctcgttttgggatgatcatttctattgtggctactcactttataagactacgcatgcgatatgatttggttatacagtaatcgatgttatagtgatcgcatacacacagtgtatgtcgaatgaagagagaactagatctagattaagtagttcggttcccaatgtatccctctgcggtgtactccgtaacacataaacgagacgcgtagggatggggcaagtatcagtgtttcatctcaattttcttatctctcttggcgaggattcagcttattctcttcatggagaggatcggaatggatccgaaagatggatgagtattaaagaaagccaaatccgttgtgccattgtggcaatctatttctttccatattggcacagctacctttcaatcttgattctattcataataaacttatccggcttgaataatatatgcataataataatttgaacatgcatcgccagccgccttcctcgtcgggatatatcgagccactcacaacaccagcccaccgtgcccctgaccatcgttctatctaccaaacagaattaacagctgcaaattctcgttcggagaaccccaatgaagatttcaagtatacacagggtatttggtcttctgggggcagcacggcagtgtctgtctctggcaatcagacaccagaagacaacacggtttgctcaactatttcccgccacttccgagcagacatagacactacgcatacagatattcctcttatagtatgtggatttgttggtggcttggtagatggcctatcattcaatgcatggggcagcttctcaagtatgcaaacaggtatgtgaattctatagtcactgttttcccgtgcaaagcccgtaaagctaatgacaaacaacacaggaaataccatcttcttggccttgggagtctctggtcagcccacaaccccagcatatctgtgggcgaagtccctaattgccctggccgtcttccttgcaagcaacatcttgttcgttcacatgcatcgcctcttgaggccacgtcgccgctcgactatgataatctcatttggtattcagactattgcgcttttggccacagcaattcttatccagctggagatcatcaccccgaagcccgaggacccccgggctccgatcgaatggatgcaagtcctggcaatctcacttctagctttccaagcaggaggccagatctgtgcttctcggatcctggccctagatgaaatcccaactgttgttgtgacagctctgctatgcgatcttcttgtcgatccaaagctgactgcaaaattcaatccgaagcgcaaccgtcgagtcggggcctttctcgcattgtttttgggcgccatgaccgcgggtggactttctaagaccacgagtatggcgtctagtatatggcttgccatgggtctgaagttgacagttaccttggggtggattgtttggcgaggggaggggaggagaaagagtgattttgaggtgtgacttggctttgtttctttttacgtcgcctattcaaaaggcatgtacacgagcccatgaaagtttcaagtaactctttgtttgctttgttgaaatacccagttattttccgtcacctatcacctcaattcgttcgtcttctgtagctttcccacctttcaattttagtatctgatcgaaccactgagcacatgcgtagtattatatcgctcttgcttcccatcaacctcgttatcgcagactttactattgcgagacttgccgtccacagcacctgcttgcaagatctcacacaaacagctcgccagaccatcggagtcaaatccccgtcatttgtccttatcactccagcaagccaagtacagcagtagcatcttacaaccccgcgctcaaataattacctaaaagctcgcccatcagctagtctctcagtatctgcggcccagtctagcatgtcgtccacttcaaggtcaccaaccagcatcatactcggaagaggtttttaaatgtcgactccgacagggcaagaaatacagaacctagaagttttagtattatcactctttttcaatttttgattacctagcatatgtaataaagttatatatttaatccatattcgagttttagaatatacttcagggagccctctaataatattgtaattcaaaatttcaacctataagaatatcgactctgaaggcgtccataaaacttacccttcaactatataaaatcatttgcatgaatattagtgctatccttgacatgaaagatcctagtataatatagtcgatcgatgagcatttcagacaattcttgttttatatttaacatgatattgtgtaccatatctcgtacataatcagacatagcgcagaaatatatcgttgtttccacaagttcctgtggtatgataaggatgtataatcgaaatctagtctatgattttataagatgactattctaccggtacctgacagtacctttttttatttgctctcatccgagagaacgaagtggagaactccgggctgtccactggcgcgacccttgctctcggagacatagatgcacttgcggaaggtaaccatcaaggaatataagaagctctcatccttctgctcgtggtagttttcaccgagcataggctggatggccttggtggctttctctgcattgtagaacggaatgcggctgaagaggtggtggaccacatggtaatcaatgatttcatggaagaagtgacggccaatgaagccggtcgtgcggtcaatggtagccagtgctcccttggtgtaagtccaggcttcggcagtgtagtgagcaacctcggggtgggtgtgttggaggtatgtgatggcaactattgatttgattagttctcattctaggatctcaggtaagatgggaatgaaagacgtactcagccagtggtgaacccagagatatggcacaacgtagaggaagaagacattccacgctccgatgatagttccagtgtaccacacgatagagcccatgatcagcaagccgatgtcggagtaggcaatgagcttccactgagcggccgtgaaaattgcgctcgatgggttgtaatggctctcaaacttcaccttctcgcttccatccgggccactcttggtaccggcagtcacgttcaggatgagatacatctgccatcccaacaattggtgtccgataagttggacaaatgagacaatgggtgtctcctcggcaaggtgcttcaactgctcaacgctaacatttctcttcgacgccaaatcatcctcggtccaggggacaaagacggtgtccttttccatgtgaccagtgtagcggtggtgacgagcatgtgtgatcttccatgagaagtatggaaccatcaggaaggagtgtgtagcccagccaatgaaatcattgatcccttggtgctttgagaaggcgccgtggccacattcgtgagcaagaatccatagtcctgtgccaacacagccttggaagaacccatacacggcccaggcaacaattcgcataggcagagaagggagaaggtggatatggagggcagcgtaaatcagagctgcacaatagatagaatctcgaaggaggtagaggagggaggttgtgagggacgattcaaaacattccttcgggattgcatctttgagggattgcaagctgggaatatccgtctgctgtaggactggaagattagcacatgtgcactgtttattggaatgatctggcgttataccatacctgttctgcctgtttgacaggctgcctttgtgtcacagccattttgaagcggaaaattgaagatgacagatacaagaaaatatgtagaggactgagagtagttttatttcatctgtcttttattttattttttccctgcccccttcgcccccataaagtatcccctaggctcgaaaaaaatgagctctagattgtcggaactcaaaaaaacattgaccaatcccctttttcgaattcttttccagaacactgtcaaattcggtgcactgacaggggatcagccttctgattgggccatcgtctaacggatggacgcgcttgttccacggattctcattgcactagcctctttctttcttttcaacgtttctggggcccaacggaatttcagtccgctggaacttttgtggccgatacaattaatcaccaaaccgagggcattcattgaatccaatatcggatactaccccatgcgagaacccctacggcaaaatccaaaccattcgggccctaggatatttcggcgtttgccctccaaggctatccaccgcgcgggaagtctcgtacacccctttttcgacctcggtagaatctagggatccactaataagcaaaggttgggaaaaaataaagagaaaaacttaataaagggcttggcagttctcgcgttgtcctactggctctgtcaggggcaggagaaacagcactgccttcgatcgcaaaaagcgtaagcactctttgatcatcctaatgacttgtctgaaaattgattaaggaagctcgggatttttcaccaaacgatagggcatgatcagcacttcggctattggaggaaatgtattggactctattttaagcttatttttgtataacgttagacaaacccgtacctaactaggcatcgcttgtaatgtacacggactctctgattgatgacagatgcgacgtgcaatttgctcaatgatcatgattaacaatgagccctcatttttgcgaacatttgcccaatcgtgacgctaccaagaatacgtgtcatttcactcgggggtcgctctggtccgatactttcagctgtagagcattttaattgtccatatcgtgtatgagccctgagcctaggcaagcctccagagttctttatcgcctttttcaatactccataccccgtacttaccttatttaaagttaagttttgaaggcctcggtagggaggagatcggagtaagaacacacgtgatagaattagcacaccgccctcgtgtcttcggacaactcccggttgaatataatgatagcgtcccacaacaaacgaattccatgtgcatgacccatgggattgcaaaactacctggactatctaccttcctctttacgcctatctgtcgcctgtgtacggagtacaactgtcttcacagccaacatgtcaaggaataattatcagactgatatcacatacatgcacgtgacctagttataagggaaaaaaaatcaacgcttgcttttctcttttttcccctgcaaatatattggccagattttgctctcttatccaatttacctgtggcgacatctacaaactggggttggataatggaagctccgtcgaacacctcgctatcctcaccccaacaagtatccttcaacgtcatatcgagcggtttattccgtatattcaaatctagatttccgtcaaatgcctttccggcatcgcttcccagctaggaatggagcgacaaggagatgcgtgatatgatctggacgcgtgatgttgaatttttgttggcaaaggcgggatctgggtgattttggtggggttgcacggaccatccacattcgagcccgacaatactccacacaaaagacgatttcaccgtacccgaagaggactatgtgttggtcgtgggcgacaatgaaaatcatctccctgatgccaaatgggtgggctatgcatacctccttgatgccataacatcttcgataccgctacgagagcctggatatccttcgctgtcatcatggttcgaaacgattgaactgcgctcgggtgtctccaaaactttgggggtaatgaattgcgcaagaagcatcgaaggtgtcgattaaagaggggttaaaagcttcatcaccgagagagagagaacagcaggagtgcaaagatgttgcaaaagcttccctttacactgagtgtcacgaaatattggaaagaaccaagtgaacttgaatcgagtgtgccaaatgaattttgaaacatctctcatatcatgaagtctcaaattccgtgatccaacttcccctattcgcaatgcgaccccgccattgtttccaatctcgctcggtgaggatttcgtccggcaaccttgaatgtcctccgtatacaccaaaagatacacaatttactagcagggcggatgttgattggatcaaaaatataacaatctcaatttcaaatggcgtcaatgccggcctaaatgcatcttgcaggtagttcccaatgaacaatcaccctgcaacatacagccgtgattccgacacggtggagtattttgacatcatcgcttacttttgtatactacagccacgatttaaaagatgctcgaaccctatcgataagatctctcagacggtaatttgatttttgaaaatattctacacttttaaagacgctctacaagacgacttattgtcatggcgccccggtatcaaagcgttgctgtaatcggcgccggtccatctggtatctctgccgtcaaagctttgcaagaagagaatgttttccaaaccatacgtctatttgagcgacggggccacattggaggaatctggcaatacgatgacattcccgatctgtttccatcccaagagtctcctagtcaacaagatcatgaaatcccaggtcgtctcccgctgctcacgtctccttctcccgaagatgtaacgtctcgcacaggcatttacgagggccttgacagcaacgtcggcgcaaaagtcatggcgttcacgcacaccccttttcctgagataaattcggcgtcgtcaactagacacttagggcggtccaatccaacccgaccatttggggtggtgagaaaatacctagaagatttgttccaagactaccttcatcttgcctcgctcaatacaacagttgaaagggttgaaaagcgagaccagaaatggactttgacacttcggcaatccggccacggggatggtaacacccccaaggactattggtgggaagagcaatttgatgctgtgattgttgcatcggggcattatagtgtgccctttgttccgttcgttccagggctaagtgccgctttcgcgcgccatccgaccgtatttgagcactcgaagtcgttccgaaaggcagacgattatgtggacaagcgtgttgtggtcgtcgggggcagcgtctcctcggcggatcttgtcgcggatttacatgccattgtgaaaggccctctcgagctgtcccagagagggaagaacgaggcgctgcaatccgcatgggatctacctaacgtcaatgccagaccaacgatcaaagagatccaagcaacggcaaaggggataagcgtcgtgttctccgacaacacccttttggagggcgtggacaagatcattttcgccactgggtacaagttgtcctatccattccttgttccaaatccagtcaccccaaacaaccgggcagcagggttttaccagcacattttcaagatcggggatccatcgttagctctcgtcggccaggtccgcgctgcgatcagcttccgggtttatgagtaccaggccgttgccgttgcccgatattttgctggtagaaatgcagcatccttgccaacgccacaagagcaggatctttgggaggtccaaagactccaacaaaaaggccatacagccctgttccacgaaatcaagcctgacttcaaggactatttcgatttcttgaccgatttggctggccccccagcaccgggaacggggggttacacactccctccttgggatgatcgatgggcagaacaaggattcgagattctccagcgaaaggataagtattggaagtcactacgaagagcagcagatggattgggggtgactgctaaactgtgaagtcagcattatttaccccgtacattccatggggaggaaaatgtaaatatgtcggtcagcaacaagagcgaacgcagtcgatctgtcactctggattatgtgccattttgaagccaagttagcataattgtggtcgcaataagacagcgagggtttaccatttctatttgcgtgctcagccattctctagttctcaaatgctgttttgcagctttcaaaacaccgcggacgggggtgggactgtccattgcagcatgtcgctcatcttttcccttatgagcaatgaatgcagaaacaggagtttccctttgtagtcaagatgtgaagaacaataagttcgatgctactctgactggccccatccgacggtcttcttgtcgcgcgggccggccaatttcccccataagacttagcgccaaccatggcccaatcacatctcgagaattttacatgggctgtcggtcacgaaaatggttggtcttcgcttaactcgttctatagcagatgattacagcgtgcaatcaaaccatccgcgcaaaacaaagtatataatcatgttactcccaaggctactccgtactccgagataaacatcctagcatctccaagtaatccgccatcatgctcggatttttcccttacggtatactcgccattgcttctgttgcagcagcacgcgatcccactgtctaccttattcgacacggagagaaacccagtgacggaggaaatggattgaatgcacaagggcttgaacgtgcacaatgcctccgcgaagtgttcggcaagaattctgggtataatatcacccatattatggcggaaacgcctaagagcagtatgttttatgtcctctctccatgcagcttcggcacaagggctaacatgaacggcacagatggcaaacgtgcccgtcccctcgacaccgttgagccgctagctgaagacctcggtctcaccgtcgacacatcttgcgaccgtgatgatccgggctgtgtcaaggatgtggttgctggatacgatggcaaaggcttggtcaacatactgatttgctgggagcacgatgcacttacggatattgcggagaaattgggagtcaaggatgcaccatcttatcccgacgataggtcagtcttcaactcatatcatagttcacgctcgacttctctaacataaatatagtttcgacatcatttggaccctcccaggtccttacgacgaaataaccgcggagaccagcgaaaattgccccggtttagatgattgagtaaataatgataaagtctaagtagggttagatgctactaatagctcattctcaatctggcttctgtaggaaggccttaacgggttcttttcattattcctatgcattgattcagttaattcatgcattgttttgtaacgtttacagatggttgagtttttttaagtcgagtgcatgaaattccgcatgtacttgctgcacacttctacttcgaaaattactagtttactacttacggatgatcatttcttatgtgtcatactatgaggaaggacctgagcaaattcgagttttgctatgccacgactctccagtttgcttctactgctatcgtgaccatcttcaaaccattattcattattcatgaatgcgtacaagttattaccatcgccggacaatctgacgacctagcgagcaaggcgtctgatgcgaggaacgcgtcctgtttacatagtgaaaggaccagaaacaagagaggatatatcgcatgtccaagttgaatttgaatttgcaatggtttgagcatagagtagtaaagattgcggttgattcatcttggtattaacaaattatggtttgaacataaacaaaagcatgaggggttgggatcccgttagcatttcgcagttaagacatgttcaggagactgtgggggatggtcaaactcttcggaaatattaagagcaattcatcatattggcaaagcatgtctccacgtggacaaagtaatgattctggttccaattaagaaacacgcggagttaatgtaccaagttatggaggtacctattcgacgtgcgaaatggtgctttccttttcattgggcttgggagcttggacggttccttcctctgcgcggaggtctgccactttgtcggactgaatatctcccttctccagcctgcgaacatgcttatactgcacacttgtcttccagggcgtaagaccgggggtggcaaacatgctttcgacctcctccagggttttaccggctgtttcagggaaggcgaagaagacatggacagtcattgcgaagcaaaagactccaaacaatacatagaccttccatttgatgttttcaaaagcgggagggacgaagtaggaaagggcaaagttaaagatccagttagacgacgttgaaagagcgacagccttgccacgcaggcgaaggggatagagctcagggggatagatccagctgacaggaccccaagttggcgcaaagctggcgacgaaaagataggtgcaagcaatgactgccttggcggcctgaggggacccggagagatcccacgactgttcgggagtattgttgagaccacccggtggggctggtttgccatacgatgccatgatgccagcgttggcaaacatgaacaccatcatgagggtagaaccgaccaaaagcggagtgcgacggccccaacgatcaatgaacaccaaagctagcacagtcatcaccacgttgatgatgtactgaatcgaggatgcgataaggttcgagtttccagtgaggccggccataccgaatacataggtaatataaagcatcatgacgttcataccagtgagctgagaccaaatttgcgtgaacataccgaggtgggttcggtaaatcatattacccttgaaaaggtcaaggtatgaggcatccttgttattgcgctcaaattcgaccatttcacggatctcgtgtaattcggcttgcacgaaaggcgcgtttcggtcacctttggcatggaccgacgccagaacctcaagagattcttcccaacgatccttcttggccaaccaacgtggactttctggcaataggaagacgcagccgaagagcagggcagcgggaaccatctgcaacccccacggagtgcgccatgcagcggtgcccttcaaaaagctacagccgtacgagacgtagaacatgatcaatataccccaagtgatcgcccactgttgtgctcccaccacctgtccacgcttactgggctgggctaactcggcgacatagactggcacttgggcgctgagtataccgacggaaactccgttgataaagcggccaacgacaagctggggtattccaaaagatgaacacacgatggcgctaccaatgcaccagatcactgagccagactggatggccccgcgacgacccagatagtcggttacgaaaccagaagctagggagcccacccaggagccaccaggcatggcagctgagataccaccctgagtggaagaggtagggcctccgcattcattgctatcattggtgccagtttggttgaagaaacacttgtactgctgggtgccgagactgccagagatagtcagtgatcatcagcctcaatctgatatttccaaggaatgggacgccttacatggcggacatagacgcgatatcaaaaccgaatagtgcgccgccgatgacggccaccgcggtgatgacatagatattagttatcttgtaacccataactaatgaagttccacaagagagtctgattaaagatggaggaagaaagtggaagaagggatagagggcaagggcgagagattttaaagatacgatccttaaatgaaatacaataaaaccccgaatgggaaaggagcaaactcaaaaatcctaaaaagaaccctgaaaacgcggagatgcggagatgccgggaaaagtgggttccccggcatactacctgcattatacgaagtagattcccactgctgtacagatgaatatgcaaattaatgccagtgagtagagtcagtagtgtagcggggaaatactatagaaggaaacccgccttttcaacttcgatatgacctgccaaagccaaccttggaagcttccgagtcaccaagtcacggattatcggctggatatcaaattagtttgtggtcagatgctagtgagccccatattatatgtaacattatatgtcacctcaagccacatggtatcatcgcgtcgtcggacatttgcctattttgttcaagggtcgtggtagaaggtccgtggatgagacttgctgtctcctgatttggcctcctttgtctcaagacataaaattcaaaactaactttccgttacagaagactgagcactaatcatcatctcgatgagagccgacacgcgccctgtgctgatgtcgatcttggcttatgaaaggcgggtgatcagacctccttgacaacacaacacgcctctcccgccatgatttggtaacacggcacatgcatgcaacgccctcagagcctgtttgtccgaccaagacactcgtggctatagtacgacccgactagcatgcaggatttacacgatactggaagcaaattccaacgctgattgactggtatatcacactgaaccattcttcccaggagctctgctacgttgaacctccatctcatattctatgctcatagctagtatcgccacattgcggttgtggctggatgattgagtgcgccccctacaaagctgtaattaagacgctaagcccacctttagggctacggttaccagattcaaacacgcggtctcggatcaagatcccgaaacaaaggggctgttttcttacgccaactgctgaccactaagaacgggtcgtttagcactcgactccttcatccctgcgccggccatcaatgacgtgggaagaatccctttggggagctaaaatcgggcggaaacaatgcatcacttcctcccgcctctcccttttgctcgacacatgtctaagaatatggtgcgaatacgttccttaccgaattgaaatcaatgacccgccgtctgctgccgtctgctgccgcctgctgatcccagctcacttattagccagcaagaatatgtgatacacctccacctacctttattacaaggctaagaatccatgcagagtccaggatcaacaatccaaatgggaaactgcgtttaactaactggttgcatcaccccctcaaatttgctagcttcagacttagcctctggtatgatcaatccttcctggctgtctagactgtctatagaaggtttgcaaggtcgtgtctgacgatcagactaccagcgttacatttatatcatgtgtggcttactgttccttgtttttcgtccaaaaaaacagcctggtccatcacgtgacccatctgtatcaaggatggaaaaatgacggttttcatcccagattctgacagtgtttctaagcttgctttgatgttgccacaaccgtgtctgataggatctttatcggtaatcttaaaaatgcaataagcccgaggtgctgccacctcaatttagcgcgacaaatggtctttcattaacataacctcgatctattcgggctatccagtggtattcgcaagttaaattgggaccgtatacggtcagccacgcgaaacgaaagccagctgcaggtcataagtcaaatctggatcgtatgagggtcattacaggatagaagccggctgtaagccgtagtacgttagattcggacggactttgcgtcgtttatgggtagttggtacgatctattagatttgattggactactttgtagtgctgcgatgaaagagggaaagattcttattttccaaggggcagaatgcccgactatctggtacggaaggttggcacgggcgacaagtacccgcagtgggcacatggtgatgtttcctttggtccatggtttcgaaagccttgggccaaagtgtggcattccgccctttgaacgaggtccgccattcgacttcctttgcaatctagttgtataacccccatgcactgtcctttacccattcagtttcgtactggggtttttggaggcctccaagtaagacaatgaaaaccccctcaaacaacttgagatatcctctctcgattggagattttaatgatgcaagaagacgaaattgagcctttacaccttgccataagagacgatatagcggagagttggggtgtgtttcccatagtgagggacttttgtgacggataatccgcactctgattgccacacttgatccaacatatattgaaactgtatttccatgttgatatgtttcagtaataactgagagatagatcccatgttcgtcaattgattgggagggggctgggagcgcgagaaggctttccagtgtgatcatttcatctttaaacacctttaaaaccgacttcggtattgctgtagacactatatcgactagccagtcgataaaaactcggagaaggagacaccagaatcccatagtcataggtcgattccccattttccccaggtttactgattggctccatccttggagcctggtaaggacctggtgaattgtattgagaagtcgtcctcgtggctttagtaaatttgaggtatctggcggaagtaatgtccatgtgtcactgtacaacgtcaggctgcgggactgattcgcaatttgggtcatgggagtctctatgctgaagattgaggggaactccagccattaaattgatggaaacatgatggacttgatgggtgtacataccgagtaagcaggatgagaggttgaagaagagaaagagagaaaggaagcaatttctgtgtatatatatacactcccctctatcaatcccctctatcctaactttgtcttataagttaagagtgagacatgcagttataagtgataggatgcctagattcacaggctcttaataacttactacatttacgaaagactatggttacctgatttctcagtagccacaccatggtgttctcctctctagcactctactactcctagtgactctgctctcacacctgtttcgcaggcagggctgtcggtgcccctgtccctcgtggcagggtccctcttcaatattgagattagaaagtttgtcctccccagatccaagcctcattcgactcatattccttatctgccatatataaattcaactagctcaatgttattctgatggtgagtgaatggtcacatgtcctaggtaatccgccattagacccgtctcgggtggagccttgtagtaccctctgtctccaataaacaaccaaacacagccatctaaacagcagtcaaagataacggtttgcatccaataattgaatgttgaaaaagttaacaatggcatagactctctagggctatatgtataaatgactcgagcaccactcgtgtagcccttgcaggcaatctccacggaggggatggccatcgatcatatacccaaggaggaagagatcgagtctgacaaggttgccttcataaaggggatacccagagatgaaaacattgagtccaacatttgcggacgtggacgtacttcccggtccggaagacaatgaccactttgagggaattcacaccgggggcgatgattcatcaccccagaaatgagaagcaaattgcgagatgtttgtgcactaggagattgtacactatggtgtggtctatgtgatccccatgcttgctagctgaccgtcctgtatggttggtgtcgctgtgttgttctcgtcttgcctgcgtggccaggctgcccatcgtgcatttccctcttcaatatctgaatttctgacgcctgtggcgttggggatcaaaatgcggggtattaccctcccggcgtaccgcctacgtgaccatagctatccgtacatatacatagacatcccggttacagttacgagaatcctcatttcctcaatttcctttattccctccgcgaatctcaaatagagcatcttctctttcagaccatgatccactactcgatgctttgctaccaccttacacattagaatcactggtacatccgcaattaaaaattcccgcccgcgatgaacggatatcttcaatgaaaactgacaaccacattctaccttgggccgaccgcggaggaaaagctgtacgcggtgtcacctccccgcgactgttttcaataacaaacccacgatctgttacacgatgtccaactcataagcacccgctaatggcaatggcccagggtgataacccctgagccatcattcccggtgagtcgctggagcatattcacctagctacacattcaagatatctctgggtccgaatggaaccaatactggataaataagagtgccataagacataatacagcattagaagccggatgtctagggttgaaagatcattgacgaaactggcggcatccgcgggggctaacgtcgaaatgcccgaaagatggcagcgatctgttgatcaacgagggacaccagacattgcattgcgtgtcgctaacatggtttagtctgagagacagagactctgaggttttaacaattttgtttctgcttgccttgctcttgtaggtgcgtccaatgtctcaggtcgatcctccgttctctcggtcaccatcaccgagcccactcgggctgattcaccttcatcatcgtcaatttttatattcccatgcctctcaatatacatttaatatcttcccaatagctactactcgtggcctttattccctctggggcgatgtagataagaaccgtctataccttaaaacatagcgccatgactctatgactaggacaccatcttcagtacagagtatcgtcgcctgcaccaccgtgcacctaggtggctcttgggctgtcaatttctggcgctcgaaccaaacacttcccgccaatccatgggaaattgtagagaacgtaatttccttgggatctgtgatatcgattaatgaatacagtcggaattagaatccgaaaaagcggcaaactttcagacaaacggaattaactcggtttcaagatgtggaaacgataaaactttgtagatccaccgacttcggtatggtgccctagcattggccggataggatcaaagtttgatcttccagaagtccgtaggtggccaaatctgcgataaaaattgatcttgaatacaatacttgagcgttgctttagtccgtaattaatttcgtggttatattcttcgctgtttacccgcggtattcagtttggcttaagttgttgaagttatccgaatgtgctatcatggacttgatacttcctaatgacgtacttctcttgataggagagcagctggaacagagagcagaccgacggaacctcgtctttgtctcccatcactttcacaatcttttcctcccactggtatatcgaaaggcgtccatctaccattggcaaaatgccaattccttcctgcatgcattactgcaacgacctgcgctggcgcgggccgttcgggagctagacataacagactggcatgcaagaagcgtatcggaagatgaatgcaatgaaattcggacttcagcatctttggtggcatggctaggtgctgtgtcatgctcaacgctcgaaagtgatcaatgggcccaaagtctcgggcaaggcctcgctgacgcctggattgcgctcattctcccattgttaagtcagctaaggaagctttcgctggcctatacgtcaaagtctccttatttggatcagatcatgcaaagggctgtggactgcaaacagccattttccgaccagccagccttccggcacctacgcgaggtctcattgcaccaccgggaagatcttgatcacagcgagcacctggaaagtgggactcaactatcatcaactctgctcctgtcatttttccaactgccgtctgttcgtgctatcgcagccaactctgtagtggaccctagctccacaagggaaccgacagattatgagaagccacgccttgccttctcctcaatcactgatattgatttccgagcaagtagtgggaactatggcatggagatattggttagttcatgcgcagaactgaagtcatttaaataccagcactcggactcgcacatcctttcgcatggttaccagccatccgccttccatcggtctttgattcacagcaaaaaaagcttgcaaatactctggctggaccactatggaagccactacccgttcaccgctgctggattgaaccaatcccacgatgagtgctttggctccctcgtcgaattcaccgccttgaaagaagtgcgcgtgagactgccaaatcttctggatattcgataccagaacgaaccaaccgtgcctctcatggagtgtctaccaccgtcacttgagactctgtatattgaaggatgcgaggagcgatatctgggaatgttggtttcccagttacagagcgtggtcaaaatccgacagactcatttccctcgactcaagcgtgtcgatatcgagggtgcattccaaaacatcccgtcggatgacgatggtcaggttgccagctccgaatcagaattacctgctgtgattaaggacaaaatatatcaggctgctgaacctttgcatatagactgcgtcaatgctggtttggagttgcatcttcacgaccgtgcactgtcacatatttgattatctctctctattcattagcgaactccaggcttgcatattccaacatttgatttgacgatagataccatctgaaacctctttttatatagacctgcctcttattattcacgactatttcaatacagactgagaatttgaacttttagatcattggacagacctccgacagacctcccactcttcattcccaattcaagtgcttgataggtatcatgccgaaaatgtgaattattcttaacgaatacactgacccaggccgcagagcgtgttcgaaattttatattgtgtatttttgtaggccaacacttcataaagaaacacgcttctaatatatcatttgcgattggattggaagtgatcggagggtattctatggtccgtgtacttaaagggaagcaagaaccgcatcggcaccagacttctgtagagctgttagcatcatacatcgctaaaacgaaggttaaaattccataccttcacaacacccctttcggtctcgatctgggcatagccgatcttaccgtgatcgataacgatcgcatagcggcccgtacggcccgaggtctcatcggcccagccaatgctcttagaaaacttggcatcgggatcggtgaggaagagctattttacaaaatcaatacaagtcgcagaaatgtgtggggcggggttgtgctgctcactatgtcatctccgcggactccgttcgccttgccccaggcactcataacgaacggatcattgaaagcaacgaccgcgacaatgtcaacccccttctcacggagcttgggcaggttgtggatatagcctggcacgtggttgatagagcatgttggggtgaaggcaccttggttcacactcacgttaacaaagtccgacttcagctacagggtgagataaacatcaacttaccgggaactgagaacaggacaactttcttgttggcccactccttcgaggcattgtagtcgataggaatgccgcaggaggtaatttcaccactttcctcgctccatggaatgtacctggaggaatcagcatcattctttgcgggggtcaggatttacccacttgaagacaacgtcgctggggaatgagtcgccgggcttgagtgtagtcatattggaattattgtgaatattagagatgagagatatgtaagaaaaagttgaggttttggaaatggcggggtgaagatgtctcgacgtcacctgtgcaagctgattaatatgtatgaggtgatcgcccggcggagctcgccgacctcggcatccaccctcccttgtctgggctggtttagacatgaatgaacttggagttttagtgataaacattatgactcaaatgactgtacgattgatgatgagctatatagagaaaggtgacaggtcaagctcccaaatttcccaaataggcaccggatgagcccgcgtggggcttagtttagatatcgagaagcgttgaaattttgggtttgagaggaacgatgcaaagatgacgccgtgaaggggcgagcgatcctcagttttctttatacattaagtttcagacgagagccgctttcttcttctgataagtctatgtaaggggaaagtgttgtacaaatttccggaaatgaatccttaacacatgcatgccatgacagccaactattttttggtgttcttcacggggtgtaagaacatcggaggcaggcagagatcactatgatcatgctttccgtgtagtgtcagcaaatttcaacagaaaaatcaagggaccagcgaaaccactcacgtcgtctgcaccatcgtaacctagccaagctcgataaatctttccggcaaattgcgacccatacatgtatgatatcttcatcatgatatcattgtgctggttccagttccagatactattccgcccagcgctgattttaccaggcttgcctgaattagctcggagattgagctcaacaggacttgtttcgtgcgcatggtaaatgggttgaggaatttgaacggctttcaatccataataaagagcccaggaggtagggcccatttcagatgctagtcccagccctttctcagtcgtatccttatgcataaggcgaagtaatcgcgccgagacacgggacatcgcgacaacagatgcccgccgcggagtgcttcccctctgccggaaattatatatacggttagtaagaagccaatcagtatgctgagggtcgaattgtggcagccaggtgatcaagtcagcttcctcgcccacgccccagctccaagactcatcttccatatctgcgcgcggtggctctggtgcttcagcccaagcctcgatgccttttgctggccgtggtccccagatactatcaacgcctgtcatgctttgatctacctgatcggtaaaattttcccagttcccgtggatagcgggcatatagaagtaggagttgcgctcccatagattcttgcgacgctgttgttttgcaaactctgttgcctgctggagaaggtcgtagaaatgtcccgtataacgtgaatccatctcaaactgccagaaaaagtcgtattgtgggttcaatcgtgagaaaatctgcatgggctgaaagtattgaagcatggctctaaagatgggttaacgtctcgaaggtactatagagaggatataaatcttactcgtgaataccgatcattgggtaccagtcctctagtatctttgagttgaagaatactgccagatcccggagctctagcggaagagactttttaagactgtccaagtccgctggataaggcaattcagtgtctttcgcatcaaccaagaggatcacctcatattctgcgcctgataagagcgacagctccattataatcgaccggatataataaagatcatcattcgtgtattccatgtcgagccatgtgcgcagaaccacccctatccgtggtttgaagatagcagaggtatggtctcggtttgtctctctcttctctctctcatgacgtttcgctgttccttcctcttgctccctgtgcagagtcgatgtcttctcgcgaatatccgaaggttgataccggtctgcattgcgctgcaaacagtccttttgcaaagtggcccaattcacgtcctgccactgtactttgtgtgtttgatctccgtagccgtatgctccatatcgagaatatcggtcgacgcagaaactccaattgagattccacgcctcgtacgatccaaatataggcgctggaaattctagaaagctatcagtgcccaagtcaaatgcgccagaataggtttggctcaattcagacctgactgattccagtgaaatcctttcatcgctgtttccgcgtccctacgatccaggactgaaccatttgggccaacacattgctgataggttcccttccacgtgttgttccattcgccgctgttatattcaggatacgggtcgtaaggtatggacgatgattcgtgcgaagttttcaatacaagctgaccgagaccacccccatcataagcaggccctgagcctagaaaaaaggcattttttcgactgtaaaaagatgagcgtgttagcgaccgggtcaaagttcgctatcatgcgatttggacgtcaggacaggtgaaaggacataccttgaagcatggattgctaaaggttgttcccttgaccgaggtataagcatgaaaattgtaaatgcaatgacgagagcgattgcaacgagactgcgctttaaagaagtccggaataagtgccggcatttttgcacaatggcgtgcattttcaagacaggtggtggtttgtaggaagtggtttagtcaatattcgtcgtcatggtagtagtgattcattaataattagggatattagagatgcgataaccagttagagcgagaaaaggaaaaagaaaaggaaaataaaaacatgcagttcctacttcggaatccagcggaaagattatggcactaaaactgcatcttagacccgggggcaacatggggcaacatggggcaatatgggggttgcagtgggccagagatagattttcaagagcctcgaagctctaagtgaaccatgaccatcccaaaatgagttcaatcttttgagactaaaactgctcatccttttgctaattgtgcgcctcttcttgaattgaacgaagaattgtggaaacaaattactaaatacataaaacgaaataatacacgctagtatatattagtacccactagcacagcctatcctaatgataatatccatggataagatctcaatctctttatagtacggagtacacatatagtagccactccatgcttcgtacctagatgactacgatgtatatgtagaggagagatcataacgcgattatatgaaattgactagaatagctaattcagaggaaagggacgctgtctaggacaaactgggacacgtgactacgtgccctagcatgtacatacatacctagatagtaccaactgtcgcccaactccacctagatttagcgtggtatttaactcggtatcttaacatattcaaaccaagttaatatataagagcagctagcatcattaacagttatataattagtcggttatcatactaactaactaagaattagcagattcagagacttgtatatcagaagggaggaatttgagaaattccatataatgcagcctgcgggttcagtactgaaaagtgagtggatcccacatatcacatacggattttgccatgccacttcttggaaaccaacttaaagcgaggtaagcctcgtcaagccttgtcgtggccgctttgagccctccgcagtatttacaatatccaagaaacagtcgcacgataaaatcggattaaattatagatttctcccttattgtcgccttgaaaattacttgaattacgattggaacattatcgacatcaaatcgaaagatgataatatggaaactccagaatggcaaattgtggcattcattcttttagttttcaacactccagatgcaatgtgagcttatcactgggcacgggcacctatattcctgacttctagggtgcatatccggcttgtcagtcgaacagcccggctccggtcaattcaaaaataccccggtatcctagcaaagcatcacgcggggaagcacggattgtttcatactacattttctaccatattgaaatttatattctccattaggattaaattcatggaattggttggatattgactgtggaacccaaattccacagatgctgacccttgactcccgcaactagaacccagaatgtataaagctgcatctatcctgcatatctagatgtaaaagtactactttgcaatattaactgggattcagtcgactgatctagaggtcttggctacattggatatcatgttcgaagaatccattcaaggcaaaagacttcgccttcttgcccggctgagttgctctttggtgtgtccacccacatattgatcaagcccaatgagaacgacccctaattatattgagccaggcctttcttattgagggttaccaggctggaattctcggaggagtgcaagataccaaaccataccgtgatgcactcggagtaagctgcctccaaccagtattgtatgttctctgctgaccttcggaaagaaccctgaaggggcggagataatcccaatgatcgcatcttcttacacactcgcagctactgtaatgtccattgtggtggttgttgtggggatgcctctaggccgccgaaattcaatcctactcggcacggtgttgatattcttcggtggcatcattcaggcagcatcatactcggtagcacaaattatcgtagcccgggtcatatgtgtaagtctgtgccctttcatcgacgtgtcccgaattcgaaattaacatatggctacctaacagggttttggtatcgcggtaagacaagtgcagcttacgagactattccatttctgatgtctctcgcagtttattacatgcaatgtccctatgtatatggtacgagcgtccctcctcttgttgacaactacaactgatctgatgcaatgatctagtctgagatgagtatccatgccaatgagcgcggccccgaggtagcgatcaactgctcttcgctcctcgcaggtatcgctttatcttactgggcggactttggattcacaagaatgtcaaatcagctatcctgggtaaggttataaattctcgtcgctaaaactgggaactaatagttgaattgtcaaagcggttgcctgtttccatccaatccatctttgctctcttttcagcagccggcattttcttctgtccggactcaccaaggtggtattatgcaaaggggcgaactgctgaaggcgatatcaccctggcaagactatacaatgtctatcgtgttgacaatagtgctcagcccgagagtgcttccatggagcttgtcagagctgagattatgcagaacctccagcttgaggcggaacaagagaaccgactcagctggctaagccttgtttgggacaacaccccgctccgtgttggccgtcggataaggatatcttttatcatcctatccattcaacaaatgatgggaatcaatatcatggtttactatatgccgctaatattttcgaacgtcggcctctcgagctttttatcgtcgctcatttctgctgttgcattgacagtccaatttacaggctcactggtcactattcctacaattgagaggattggccggcgtcgaatcatgctggttgcagctgccgttcagagctgttgtatgcttgttttcgtggttttgaatggtcttcctagtaagacggaaaagacccaatgggcagccgctgctatgatgttcccatatatgttcatgtacggctggggatgggttacctgtccgtggtaagcattcaaagctgtcaaatttgcaatgcataaaggttgacacttattctaggctatatggacccgaggtatgattcttcgctgtgctcggcacgcctaatctgacttgaatatccccagatcgctcccctcaagtatcgccacatcggagccgcagttggcctgttcggcgagtggctattcagttttgtgacagtaattgctggcggcatcgggctcgagacatccggctggaagatatggatttggccccttattttcaacgtgctgggttttgtcttcgtctatttcatgtgccctgatgtgagtgctctaccatcgaagcccaagagagcgatcttgctaactcaatatcaaatagccgaccgggagaactctggaagaaattgacgctctatttgacacggacttcagattaccacacacttccgacgagaagttatcagtgcatcaaattgagaatacgcatcaaattgagaatacggcttaagtcatcaaatgagatgcctttggaaagaaaggcgagcttgtacatgtgacgtcgcttttaatatgctatctaaaactcgatattcgaatatccgttgtaccagaaccaatatcctcgtgcgttgcggagatgtatatgtgggggattgtatcagggacccccccccttggttgttccaacccccctttggctaataggaccttcccagcccgagattttaggtatcagttatttctgccgtttcttgtattttctgccaggttgcaaagtgggaagcggcttgcttatatatggttgacctttacaaacgttgcaagcttcgaaccttcttgctgagcaatcgcaaatacctatataaacaggaataagcaagcaaataactatgttgtatacaaatcgtaggaaaggtggccaggaaagcggccaaaggtacggtgagcctttatagtaggcggtcagtttatgcctgaactatcgggcggattgcattagccaaggggggtccttgatacaattccctacatatatatggacctattattcccctaccttagtagagatcgaggaaatggatgtttagagttttttattcaaggtaccatttgtattggtatactatacaaaaggtaccttattttgcaatttttatcgttcagcgaaaattatcgttgactggggtaccagtgggcgcctaacacgattactgtttcgcaaacaaatggtattggacacggcattaatactagtgcaaaaggagtctctcaactccggtatatataattgatcatattcagcagggttcaaaatatatgttctttttcatagcttgtatttgtgttcatgtggctctagccgtcgtattacttgtgcgatagcactcttacgttcaccgcgactttgccaaaacgccggaatggactttgtagtttcgcataagaggcgaagagcgttgattcctctggaagcatgctcctccggaatcatttgtcctggttgattcagtgatgcattgaacacctcaagcgagattgggcctcggtacccggtgccaagcacagcagctgcgacaagctcaacaggcatatatgcacctctagactgctccataggatatagccgatgacttcgcgaccatggaagcagtgctggtgtatctgggtcagttggaggaaggaaagtcgttgggttcatcaactccgcatcgccacactggaagaaaaatatccgatcacccggtaccgtcgagaccaatgacgcgagtgatccggtaaggacttctagagattcctctaaggttgggtaaatccgcccgtggccagcaacattgtacggatcagcaaactcgacggcgaggatattgaaggcatccacgattagtccaacgttggggcggttggcaaattgcaccacttcccatgaggccgaccatgtgtttcgagtcgcccaagataggccttcgtacccaatttttaacattcgcccaccgtcagcctttgcgtatgcggccgccatgtcgcccagttccgcgagatctcgtgccactgtcttgagatcagatgtcacacccttatccgcgcgaatattcgcacacatgaagacaagatcggtgtcaaaggcgcgcatgaacggaaaacgtctatgtagtaggttagtatagatcgccgctatgtcattatcgaggtaaggtatatctcacttggcgactagatcgaaggtagcctggcgttctgttggatctttgattccttcaattttccgaagaggctgggtgcaagcaatccgcattcccaaggacttgacaagacgagccaacttttgagcaatctgcagattctctgaagtgggttcccaaggctggtctcctggcagtccatgttcctccaggtatgcagcccaacactcatcaaacaagtcgatccattgatatcccgattcagccgcggctttcaagcgtggttccaaacgatgctctctccagttgccgagggacaaggtggcgatacccagtgggttggctttatatggaggccaggatactgtcatacttccaggtatggtagcttgtatgattttttttgggtaatgagtcgcgtcaattaatacaacaaagggatgcgaatatctcgaatatccaacctgagttgatgccacctccacaaaccggtgtattttttaatgcaccgagtggggtagtctatcattcttatgaaggtgtacagtattatgtattaatcaatcaaaggatttagaaggattcagataacaattgattgatattgttaaagttttattgaaagtgccccaagcttaagggactataaggtcaatgtacagacacctaaacgaatctcaagttcccgcacaaccaagttttcaactcaaggctcttcaataaaacgaccgttaatcgcatgatatccttaattctacaagatgttgaaacgaaataccctgggcgactggaagcttgacgcgtatcaatggagttttccacccagcctcttggtgatacctgcgtcgtctccgagccgtaggtccaaagagtgttgtcggggacaactatagtccctttcgtgcccaaaatgctataaatatccacttggatctctgcctttggatacaaaggattgtcgccagtagcagactcccaaccgtatgggctcgccacattgtcactcaccagaaatgtgccaacaactccgttggaaaattgggccataatcgctgctccctcttcaacgatatcatcggccgccacactttcgtgtttccttctgggtatggtgtttatggcccatacacatgtcatcctggcacctgtgaggaaatgaagggcatcgatatcatgcacaaaattcgtccaaatcggccctcctccggcggaccgcgttgcccgccaactagcagaagtaaaatagccttcatctttctttgcagtccacaatcccgagatagctgtaatcttcccaatttttcctgtttcgatcaccgaccgtgtagttaacagcgagggatggaatctgcggtggtgtcccacaaggattttgcaacctttttcatttgcaagcgcaagtaactcggttccagatttcgaatctgtacaaaagggtttttcgatgagtaaggccttgggacgtgctcgatagatgacatctatcgctatggaaacatggagactcgaagggacgcatatcacgtaggcctttggtggcttttgtagcgccttcaaaagtgatgcaacagactcgaagtgcggaagagacaagctcgacgccaattcgcgtcccgggtggtacggatcaacaattgccaccagttcacatgttggtgaagacataagatgcttgacgtgcaaaggagctatggtacctcccccgataagagcgatgcgaaccttcgggctttctgccatactgaagacacaagacaactgtttttggattcacgtagaaggcctatgaacctaaacaatgtggggattaaacattcattagatagaagatatatttcacagtttgatcccggtcaatatatcaaaatgccgacaaatatgaatgcggggtcatcgaaattcccgtaagttgtcttcctagattcgttggtattattttcaatgatttctctcgttagtccctccaaccctacttctggtccatacaaacaccaaatatggatatcctcaagcaatcttatgctcacggcagctccccgttaccatcgaacgcagcagtgactcagtatcacatctatctttttggtagtaatatctccaaatcactatcgcccttgatacactctatcctatttcgcgccaactcagcctcatgggaatttcacctcagccagaccactgacgggaacatattctggaagcaattacgtgacaacacatgcattgggaccacaatcacgatgccgaacaaggtgtcctttggcctcctactcgacgacttgaccgacgaggcacgcgttattggggccgtcaacacctcattcgttcggcttgatgatcgtggacagagaagatatatcggcacaaacacagactgcatcggtattcgcgattctattctctaccgaatgccccaagcggctgccatggccaaaggccgcccgtcgatggtgattggtggtggaggcgctgcgaggagcgcaatttttgccctctggaaatggtttgggtccacaaagatctatgttgccaaccgtctcaaagccgaagtagatgctttgatcaccttctttcaatcgacggcaccggatatgacactccaacatctcgctactgttgaggaagctgcaacctgcgaggctccttatattgtcatcgggacaattccaaacgatacaccaaaagaacctggtgaaattatttgccgtcaaatcttcgacaccattttgcgcaggaagaacaaaggcatcgtagtagatatgtgctatctcccattgccagtgacttatttgtatacaaatggacagcaaaatggctgggcagtcatcccagggaccgaggttctagtgcgtgtttgcatagcacaacatattctctggttggagaaggatgtcaataaacaaggagtggaagatgcgatttcagctatctggaaagttgtaaatcaggggcaaagtggtccaaaggcttcgaagatttgaattggatttttagcgttgagactttcattgaatactcacctactcattcttcattctattattttctcctcccttggcgtaaaacaagtatgcatctcatgaagtgtgcgcaagtggagatggctgcgggtgtcatcgattccttcgagatagtatagccctttaactaactaggaaggagttgatgcctagatgccttatcttataatggcagaaaaattctattggcactcccacatagctcaccgccactataaacatataccgcctacctaaaacgcgcagtatactagtatagatttcatagtatgaattcatggagtttttgaccggcaatatgttagaattaatcatggggtggctaagggtgcaaaaccttatgtccagtcgctgtacggagtacatatgccttaataatcgaagtactcccgaggtctggttcggagagagagcttgccagccacctccaaaaattgagatgcatgaatttgtatggtgccgaaagcttcatttattacatggatcatttatatttgtatagagcagtgtaaagagcggtgctaatgaaggcattcagggaccaaaatgcttcttaaaaaggggtttgaacgctggggtatcaaaggaacaaaacaaaatatacatgtcacttgaagattttgactcgtagtagcaatatttacctctggtttcgggcctaattccgatcattagtgcgactgtttccccgcagttgtgattgaccgggtgacaaataaatagcccggttaactaggtgaggatatcactagatgctacaagatatagagcggaataaaggcgcattatgtcccagcgagagaacttaaatttctcttaaacattttttaactttgttgctgggtctgtatcaccatgtctgcatcgcacatctcccctctcgctcaggtatgcttctctggttaaaccaaaccctcgatgagactttctaacaacaaacaactagcccattacgttgaaactctctgggaaagtaatccgcaatcgtttatatcgcacacctctcagcgaatatgcttcaacgtatgacgaaaacaacgtggagaactgcggcaagcccatggaccgatatgcagagctatatcaaagtatgatcgggactatcataccaataggactagtgctaacgagtacacagagctagccgatggaggcgcggggcttatttgcactggaaacatccccattcatcgcgacaatctcgaaaattacaacaatgcggtgttggatcccaacaatccctgggatccggtcgcagcttttactcccgcggccaaagcagccaaatctcggggtgcaatattcctccctcagttacaatttccaggacgtcaggttccggaattcctgaacaaaaatcccaagtcatcatctgatcagcagcttgaaccttgtctcaacaaaacgtatggcaagccctcgccgttgacgaaggctgaaatcaaggatctcatttcgcgatacgtgtgggcttctgaggtccttgcagaggctggtgcagatggtatcattgtgagtgtttgaatctattcctgacttgttatgaaaagctaaatgaggcgtattggtagctgcatgccagccacggatatatcatgaatcagttcctgtcgcccaaaatcaacaagcgaacagacgaggtatgaatgttaaattcctctcccccttgcaatcaattaatgctaatattgactaaactttacagtatggcggaagccttgaaaatcgggcacgctttattttggagatcgtcaatgcgatcaaggctaaacttccatcggacaagtttgtgatagcagcgaagttgaactgccaagattgttagtatttccatcccatattttgaagaaaagcctaatgggaagatatatgtagtcatcgagggaggccaaagctttgctgaacaatgcgttgtgataaaatggctagaagatgccggtgtggacttttttgatatctcggggggaacatatgcctctcctgcatggcgtggcaacatcatgactgaacttgcagagcgtccatcccaaaaacagcgtggaaggtaaatgatttcaattgcttcactgtttttatatgctgactatgcgaagttacttcattgagtgggcgcaggagttgaagaaagtgctggtgagtatattacatgttttctgcgacttgtgatcaaataagctgattgacaaatcactagtctcgggctgtgattggaactaccggtggctggcgtgatagccatcgtatggcggaggctgtggaacgtggagacatcgacatgtgtggtctgggtcgacctctccgagaagatcccgcctttgtgaataaggtgcttcaaggggaaattcgcagaagtaacttgtaggttgatactcagtgatctgaaacagtcactgtaacccacataatatattcaatgggatgttaggaatcccgcaaagaatcatattttcttctctttttttcacttataagatcactaagaatgtacctttgacccttcatgcagacttttcccatttagttcatagaagccattgtaaaatcaatgctaacctgactgagaaatacatggtttatgaaagcagtagattattgccagtcattggacactaaaaatgcataaacaatagctatgcttttcagatttctatttgccaaaattgttaaaagacggccccaaatccaggcccgaacatttcccggaagaagtcagcaaacccctcatcatttagatccccctgggtagaaattgacgctgtagtcaggaaaggatcgtaatccgagacgaaagcctcgtatggcttcgaatggggggacttctgtggcataaattgactcgcttcgttatcaaagtctgtactggtgtacgacgcatccgttctggtctggcgaagttgactttgggctttcagtcccgccgctctggctctcagtatcatcatgaggtgttgtccaagtaacgctgcgattccaaatcgatgcggtggagttgttcctgcacgttctaattgaatggcaagttggctgagtaaagcaagaagttccacgtcatttccggcgcgggatccatacacggtgggaaatagcttcaaagccaacacgccggcgtatgatatcatagcccaagttggggccaacatgcaatataatggctccccaatatgatgcaaatcgcgcacggcgacctcgcaagaattgactgcagcctcaaagcaatccagtcggattgcatccatattttggtcccagtttatggaaccgtgaagggcaaacgacaaggtccaaagcctcccgtggagataaacataatggaggaagatatgggataacttttcagacggcgatgtgattatatcgggcattggatgtgacagccaaaggtcacaccacggcctcagagttgtatcaaccatttctcgtacccaatggggatcaacgtgtgtcaaatgagcttgattttttagttcattttgtagtgatgttagaatgcgtcgcaaggtgataaatgcacatgtgtgcttgtctgtagggtccgccagatgatgaagccaccagctatcaacactttgtgtcaagtccgtttccgggaatgtgtgaattctaccgcaggctgcactgttcgcccgttcccatagtagaatccttagccaagttctctcgcgatttcgtgccatgcgttgattatcggtgtgatcctttggggggtactccagtaataaccgggacgagtcctctcttgggagtggtgctggggctgcatcttgggttcggtaataggaagcactgagcgtgttcagaggtgtcgcatctttggcactagaatcctgatctaggcctagttcggctgctacaccaaaggcatacattgtgtagagccatgagcgttcctgtgacagtgtctctgcgggagtggccgataacaatgagatatagtagccttgaacgatttcaaccgacttatatccacaagtatgaacgtgtttcgagagtttttcgccatgaaggcgtaatcgctttgcgactgatgctgactcatgatcgaattgggcagttaaagccagtatccaggtgaacaaaagagccgatcgtgaacgcacgaaatctggtgtatgaagcatcggatctaggattccgttgactggatgcaagcggctgaaatatctagaattaatcagtggatttatattgacagtgcagttaatatttggacttacattggaaatagataatagacctcagccatggtcaccaaaccaaggtccactgggtcaacatcggggccaacatcgcgtagaggcacttgaggagatgacttgaaatagttcgagtaacggtatgggtgctcagaaggaccgagcagagcatctattcctgcttcaagggtgtctctgtccagttgtaggccaagtgacacgtagcctggccgatgaagcagttgccgacccaggcttgctccaatggactggctagccgatgactgtgaagtagaaggtgtttcgtttgtttcacaggaagtgttggcagacattgactgtagctccaaagcttgggcggcgtcggaggcatctgccagcaaggccaaaggattactgattggttcccggttggcttgagagagttcgccgctgcggaatacaggagagacaagttccgctagccgctgattctcttgtatagctggcagagtcgagttaaaacatgacgcacaagagagttcacttcctagctctggtgatgttttggtggggttggttgtctcggctgagtggttagagaataagagctctagaatcggctcttcgcttgcgacgaaatcatccatctcatgattctcgcccgtataacaggtttttgccttctttaattccgactgcattttccgataggctttttcaaaaccttgatagcgacctgtcgcaccgcgcttcctcccaagttttctcggctctgggatattgcactcgcggttggtacgcttacatcgttggcaaggttctgtcaagttgtcgccctgttgctccctttgtgggcggatgcatctcatctgaaaaatattttgtgagtaagtatgtatatgacttggggtcaaggattgtagggtataccttcattttccgacatgcctcacacgcggccgcgctggcgcgagtttggccagaggtattatcatccccagaatatgatgacattgaggctctaagcatcaaataaataataggatcgaggtagtcaatggaaaatgtttgtttgatttagggagaagagagagtgtggagaaataacaaagaaccccggaatttcaaaaactgcggggaaattttcggctatgagataagttataactctacacgcctcgacctccgtccacctccaatgtcgttccagttacaaaactgctctgctccgatcccaggtaccatgctgcattggctatatccactggctggcataatcgcttcattggcaacgagtcttctacttggcgtagccgctggcgggaatctgcgccatttcgaatgctagattgaagccttgttcatgttaatattgacctgggggttgatttgggtcaacatacatcgacgtgtttcccacagcaggggaaatacagttgaatcgaacagctggagcatactcaagagccattgtcttggttgctacctaaaaacgcgtcactatctggcgcatccaagagcttcccgtttttcacttacttctacggctgctttggaagcgttgtaaatggcaaatcctggccgagggcgtgtacaacccgtgctgcaccagtcaataacttcataccagaatcggattggctgacccacctcgttatgttgataaatattccatgtccctgctgcatcataacaggcgcaaagacctgtgcacttataaaaaccggctgtataggtattgtcaagctgttatccacccacagcagctagggcatcctactttcacgttgacattgaaagtcttctcatattcgaggagactcttcgtgtggatgggctaaaccatcgcattagaagggtgatcgcattcatggagggaaacatacagatgggtcatgggtaattcctagttgggctgagtcaacaaatcagatcgtaatgttggctctttggaatgttctcaccagcattgttgaccaccacatcaactctaccatgggttgtctgtgccaaagctagggcgttctgccatgtctctgggcgagtcacatcgccaaggagaaattcgatattctggtcggctcgctgcttactttcacctttcacttgatccaaatctaatattatgaccttgcatccctctcgactaaagcgatccacgatagcagcaccaaatccatcagcgccacctaagaaaaagtcccagttagtccagagctgaccggatgggatggatagatgaacctgtaacaatcaccacacgtggagtgttcattttcgcacgaagaggcatagttcactcgatttattttcgtaatatgggcgttttcttccgctcaattttcttcttatgttttaactgcttaaatcggtatctcatctcactatccccgcacttcgctcactccaccggcttcaaatttggtcaccggaattccctcatctcagatatctttgcattctcgcatcaggacaactcttctatccctgttcggccttccctggttattctgaatttccagacaacatgacatccatcaaagttgcgattgctagtaattcgctgggcaagtcgacttcggggcatacacttcttcataaacttgagacggctaaattgcacggatttgatggagtggaggttgcgatcgagtgtcttgaagcgcatgcttcctctttctcccagtcttctcgagcttctcgcctgcgtgcagctgccactcatgttgaccaaaaagcgcaagatttatctttatctttgattgcgctcaacccatttggcgcatacgatgggcttgttaaccctgtcgaagttgagtctcgcctagaggaggctgagctctggtttgatctttgtcgattgatgcgaattccaatctttcaggtgcgcactattgacattttgatggctccgtgtcagactgaccttgcttttttactgtagatcacatcgtgcctctaccctatcgatcctgttagaattacgccggaggtaaccacaatcgccgcgaacatgaagcgattgggtctccttgcccaaaaatacggtttgctagttggatacgaagcccccgcctggggaactcacctcaacacttggcaacaaatccatgaaatcatcaagctcgttgatcttcccaacgtttgtcattgtcttgataccttccatatttctgccaaagaggcaggtgatccatttagtgctgtggctcctattcggccaggcggcctggcaaatttacgccgatccttggaggaaatgaaacgaactgtgacgccaaatcagattgcttattttcagttaagcgatgcaatggttgctgaccagggccaggtgggctaccaacggcgtgatctcaatcaacccccctatatgacacaatcgcgaaactgccggatctttccctgcgaagcgaaccgtggaggtgtgcttcctgtacttgaggttgcacaagcggtgtttgatcttggctacacgggatgggtgtcgatggaagtatttcatactgatatgtggaatacgcgctcctcgtaagtgagatattcaatgagaatgaccttttctcttaactttaacttgtgtatagagtacccgacgactgggctcaaagaggaatggcttcatggcgagaaatatctttccactgcgggcttgatcggcataccaacgggaggttgtgaaaatattgaatgctatgtaagataacaatgttggaatcatcagcacttgaaacttaagtactacacacaatactctcatgtgacaaaaagcatattcaaactattaatatctatagaggattaataacaataactgtcgaccttccccttggtaactaactaactaccgcttttgcccccacgcctccttctatctaccgcgcccataccgccttataattatatacaccgctttcgtggcaaatagtaataagacagtagatacctgcaatttgtatgtaagcctctaacaaactcaagtcacttttgttatatcaactgcgccatcaaaaatgcttcattaatacctggggctacgtcctacaggaatcaggtagagtacacgactttttctaatcaacatgcatgttttattactatgtaaaccagaagatggcagaatacatggcagaaaaaataaagcgtggcagaaataggcagaattctgagcgatatccgatcaggaaggcggggtcgatagttataccaatccctatatattgaatgtcaatataagaaattgtatgtatttgacgtttccaacttctaagctctgctctttttaatttcttgtctagattccgctaccatccctcatcattgtctagctttgctcacatggaattatattcagccgtcaactgtgaatgagatatctgtgcggagtatggccccgcagtggtgtccacccggtcacttaatttattcgccggcgccgaggcatctataagtgagtatcaaactcgaaaatataaccattatgttaaatattagtcacttgctctgatgaagttttcaagaaatagttcttcttccgtttctagcccgacatcaaccatatccacaatggagagaattcaagtcgatgtcctcgtctgcggggctggcatgtctggaatggcatgcgctgcttttgcggcggaagcaggagccaaagtactggtcgtcgaaaagcaaggggatgttggtggttcgtcaaattattctgcaggaatgttgtacgtgattgaatcaatcttcaagccaaactaggttgttaatacatactgtcaacggacagctgggctccacagacatacaaaaaactgagagactgggtcccagaaggagatccagaattacaaaaggcctggttaagcgattatctaccggctgtacagtggatgcgtgaaaatggggtgccaacagcagaccggttcgacggcatcatgacaatcggtaaggctaaaagaaaaagaatttaatgaacagtgaccctgacacatcataggaattggattcccaattaaaatcccacaccttcataacctccatcgaaagcgcattcagtctagcaagacacgttccgatattttcaccaacacgtcggtggtcaagttgattcagaaacagcccggggtttcagggtcgagcatacttggcgctgtcatttgcaggaactcccccaattctccagctaaatattatgaagtccgagccaaaacggtggttttggctacgggaggtttccaaggttctccggggatgacatcccaatacttgggacaaggtggagacaacatttttgtgcgctccaatcgtggatcggtgggcgatggacttaagctggccatcgaatctggtgctgggactagtagaggaatgaatacctactatggtcatcttctggcagctcctcttcgagccgaagacgtgaatccaaaggactatcttccactcgcccaataccgtaagagcaagtccttgtcaactcagcatttctctctaatcagtctacagaaagcaaatactgcctactgttgaacgaggcaggtcggcgatttgccgatgagaccacgggtgacgagatcatcaatcagtatctcgccaagcagcaaaagcgccgcgggtttatattattcaagtatgtcccagacagaaaaaattggggcgaaattctaacctatggcttactattctagcgagaaaacccgtctccaacactgcgtcactgcgttgttccctaatgcaggggacatcgatcgtctgcagaaagcccgcgaacatggctgtaatgttggaagtgcgtcgacattgagtggtctgatagatgttcttcacgcctggggtgtgaacaatgtacaggcaagacggactatcgaggattatgaccaagtcgtgcgtttagggaacaagagcatttcccttgacgcacctattggtcgtgcttgttctccccctgcaccattggtagatggggaaggtcccttctatgccatggaggtccagccgtcgtaggttatatcttacacagtccagttccacctatctaatttcccataggatcacattcacctacggcggtatcgcgatcgatgcgaaagggcacgccttgacccccgataaatccagaattccaggcttgcttgtcgcgggtgtcgatgctggcggcttcagtaatctcggatacgccgggggtcttgcactcgcgttcgtcacaggactatgggcggcccgagaggtcgcacgcgacttggggttgcctgagcctcgcctaccccctcccgaccttcgagacggggaggataaaccaatccaagggcgtctttgagctagttccattgcaggttgcatctagaagttgacctcgttgtgattgcttttgatcaaaatagtattgtgcaaatctacaacatacactaaatattgtgacgtcgggtggctcaatccatttctatcaaggtcctcgcctttcagccgatgaatataagcaacgaccctcccattctctgcttccgatcctcttatggtaaaaaactcagttcaccattgatgtctggggcgatcaataagtgattgaaccctctcagtaggtacggctctgttgcttctctctcccctccccgtccccttgttttctaccctatcggaaagcttacttctctcactgaactctgacgtgtttccaagacttttactacttcatcacacatatggtaactatacacgaacgcgaccgggcaaccacttcatattcatggtatattcaatcatttgcatatattctaaccgcggctttagatacagacttcgcctcccaaattcttcactcggatcagaaacacccattgggcttttctttttccacatcgggatattctatggtgccaccaaaacgccgcgataacgcatttttccttcttccaatgtcttcaggctttgtttgataccatccaacgtcaaggggaaggtcatcttgacaggtttgatgttgtggaatgaggcaaattcaagcatatccctgtggacctgtcttgaagccacgatacctccttggatccgaaggccattcacgagcagcggcatatatgggattttgagatcgtttgagtcgacggacagaggagaaatgacaccactgggagccatgatactcaagtacattgaccaatctggctgactgctagtcgtcacaatgaggttgtcgataggagctttgaccttcaactccttcacacccttagtcgcatagaattcgccggctcccagcttgatcgcctcttccttcttgctgtctgtgccggagaagaccacgacttgacagcccatctttgcagcgaattgaatagccagatgtcccaggccgcctactccaacgataccaacgcgagcggttggacgaacctgcgcgacatggagggcgttgaaaacagtcgatcccccacacatcaatggtcccgcatcttcgttgctcatgttgtcgggaaccttgaacaaaaaggcttcacgccacaccgcgtgggtaccgaaagacccttgatcgagatcggctagaccgtacatttttcgcttgctgcacaatgtctcccacccggtgaggcattgcttgcaagaaccacagcagtcatgctcataaccccaacccacgcggtcgcctttcgtcaaagtcttcgcgtctgggccagttgcttccaccacacccgttccctcatggccaagggccatgtcggctgactggtagtgagcatcggtgccgcacacccccgaatgcgtggttcgtactaagacttcgtctcgtttgaggtcctccagctcagtctccgcctgtttgattccatccttggagcccctgtatacggtgaatttgattgtcattgtgggaaatattgatgcaagatatttgagtttgcgaaattggaatttattgatgaaggaatcagatgtttacacttatcagcccacgagcctgctttataggccagcccgtttaagtacgtcagtacccatatttcataccggaaagtgaacaaagcttgtgtcatcacatattcagtcaagagaagcaaaacaagttgatacgattgagtgggcctcctgagtcctggtcgatgagatgggtagtgataggcactgatagcaaggcccttttcccctagacttccttgatttgagctgaaagctcgatgcaaagagttcataggtcaaagctataaaactctcggcctcgtttatgtatcccgtagcctttcctggcttggtcaactttacagacttcgaaggactgaaacttgatgacatcatacaggttcagcgtcaccaacatagcatatggtcacgtggcagagcaaacatccatggatgcgattacttcatgcccctccggatgcggaagatcttgtaaaatgttcctagatcctagctcgctcttcaacaaacaatactaaacctcgaaggaaaccattctggcggatttaagggaggacatatagtattcgaaaagctcttgaaatccatagattcgagagctttgatatccatatcatggaatatcctcattgagatcccattttgaaggcatcggcatcttcaactcagttatcgatgatggtactccgtgctaccgtctgggcaagtgattgacgctcttctccgatcgtcgctaattctgccataatgcaaaggcggtaatataaggccacacgcgatatcgggcatcccgatttggaaggtacgaagtctaaataacaaattttcgctcgcctcacactttaattgttgcatatagtcatattcaaaagacatatagattcttccctctgcaaagttcagggaagccatcttggtgggacaacatgattcaggtccatggcataactagcgccggtgaatcaccccacgtctcgtccgaaaaagatgcagctttggcggtagtgagcgagttcgcccaagaaattgatccggtcgtggaaaaaagggttctgcgaaagattgatttgtatttgatgcctgccatgcttataggttagttatacgcttcatatccgtgacatgggaattgttgactaactcgaacacaggctacggcatggtgtactatgacaaggtgcgatgactgcgccgatggctttgttagccaatatatacttatttctcataggctatcttaggtagtgccacgctctttggcatgacgaccgacttgggattgctagtgaaagactattccacttctcctccctctgctgatacttcacggctcagctgggcaacgtcgatcttttattttggaatgcttgctggcctatacccgatgacatttatcttgcaaagatttaatactcgaattgttcttggtccagttgtcctgacatgggccattgtctgtgccgccaccgccggtgtgacaacctggcaagggctttttgttcaacgattcttcctcggtatgtgaccttcaatttcttttactaatctcttatctaataaacgataggctttatcgaaagtgttattcccacgggcttcatgaccatagtcagcgggtggtacacccaagaggagcaggctcttcgacaggcatggtggttctctggcaccggttggttcactatcatcggtggcgccatgaactatgggtttggccaaatcacggctggatcattgaaaagatggcagtacatctatattctggctggtgccttgacctttttgtttggcctctggtgttgcaccatgcctaattctccggtttctgcctggttcttaaccctagaagaacgaagggttgctgttgagagactacgcaaggggcaaacgggtgttcggtgccagaagatcaaattcgatcagatcaaagagtctatgatggacattaagatctatctagtggctatcatgatggcagcagcgtgagtttcgtctctcgttataccaccctaataacaattaggcagcatacattccttgctgttaacctctctaaatataggtacactatcaatggcgctatctcgggctttgggccgttgattgtatccaccttcggctatgatacgcttcattcgattttattccagtttcccgtcggcggcatttgtgtcattttcattcctctttgtggttatatccctactgttgtccctaatacccgcatacccttgctcatcgtgtgctgcctacctgttattgctggctgtgtgatgatttggaaatcccaatggggatatcatccagttactccagttgttggttatgcgctaactggcttctttgggccagtggtcagcctggtcatcacaattggagctagcaacgtcgccggagcgacgaagaaaaccgtcatggcagcaaccgtgtttgtggcttacactgtcggcaacatcatcgggccgcagcttgtgaaaagcaagactaagtcacagcattatccagaactctggactgggatgatcatctggtaagtccgtaactgattcttcttgttggactactctaactaagtatagctactgtatcacaattgctgccgcagtcgtgttgtactttgtccttcggcgggaaaaccaaattcgggaatcattggaattggatgaggtgcaacgagacaagattgcatttgacgatctcaccgacaagcagaatccctttttccgatatgctttataatgacccttccatctacgagatggagactcatcgaaatcgaagctagaatttctggctgctctctaacactacatatctgacactcatatcacgtgcacatgtcctgtagaagataccaaaaaagtccaaataacatattcaaatatactcaaataccttcagttgaattggaactgtcctgaacgtacatagttcatcaagggtccctggcttgctccatatcctttatattcaataataaacgtacgatgtgccgatatgcgactccttgcgaaagcagatagtaacataacaacctacaaactggaggattagagaaggattccaaatattatgccacatgttttcgatcatcattgggctcgattttactactatagagttacaggaatgttgcaatattctaacgcaggttcggtccaacactcatgtctccagcatatttaatccaactcgggctgtttcatgatcatacgtgataccaaattccgggaattaaattcgatctaagataggctaggtgtattcgggaaccaaagagaaaaagaaagcacaagtacccttgaagcactttatgacttgcagaaagtggtagccatcgcatcacttgcaccactacctggctcccaaggcctcctattcgttcgctatgttagttagtcagttagtttccttcattctaactggtcaacttccatgattatttcttcctttcacttcgccctgagcacatatcctccttgcatagttcggtcggaatcaaatccccacccttgatgcaagacttgacaaggagctttgcatctcctcagctgaaataaaattgtgtgtaacaaggttcacggattcgaatctgttcgaattacagtccctcttacaatttgatctagaaacaggctccgtattagtctgtcggattgcgaattcctctggcggaactgaatgtagtttggatacataaaaaaagcaaaaaagaacaaaaagcccagccgatattgggtataaaaatatgtacaacggaaaataaaataaatgatataagacatcccaacgctcgaatacccacagtaccaacaaaatgagagaaataagaagtgtccagaagatttcatcttcatgctatagctgggacttctcactcctatgaacaattgtttcatgaacaacctttattccaccctggctactctggctctgtgacttccagtcgccgtcgcctgcggtgcatgtaggcggttgctgtcgtgaggtaggcaagatcatttgctcgtcgctgattgtattccattgagtgtctccgggaatcgatagcggatggcggaacttcttgcgtttggaatacccgccgccagtgtcggcatctgatagatggtagccagggtaactctctgactcattccttgatgtgatgtacagaccagcacgttttgtaaatcgtcttatcaatgggtatatcataggaatatttccgatgatgacggcgacgaaagtctcgcggcaggcccagctgccagcttgttgagccccatttgcgccagcctggtgaactgttagattgtgttatcccagcaagtaactctcaatacaacttactgttaagatgagaacacaacgcagaataccagccatcatgacaaagaggccaccactaaaaagaaccaagagctcgagtttttcccgccattttagtcgggctttaacaagcatcttgatgcatgtgttgttagcaacattagacaccgatgtttagagcgaggcttaccggtgctggaatactaattaaatagaggtcggtcgcgacattgagtaccacggtcacatagatgtcgatcttggacacggcgggctggcagtaatctaacgaatagtcagagacacggtctctcaggatgagaagatatgacacacttccagggtttggatatatttgccaattcttgtccattggatgacatccgaagagaattgaacaaaccgttgcaatataagttatggcaatgagaacgtaggcgatatggattcggattcgcatattcactaatcctgcgctaaagggtaggatatacgtcagtgacaaaggaccgaatagatgcaatcgaatcaaaacccacgtcaatcgagagtagaaaatggccatgcatgttttcagcaaccataataacagagtgtatagtgaccagccggccacctggaccttagagccgcccacacgcaggcgatattcttccgaattatgcgacaactctcttcgctcttcgtctgtcatcgcattattggcaaggcccatgaaccacgcgccgaccatgtacgcagcaccggtttctagcccatacaccacctgtaccccatattgattagcaagctgaaagcaaagagaacccaggttccaattcaactcacacatgccaccagcattagataatcatcagcttggaacccttttgggccaaccataatccatcttgcagttgttcgtaggccaattacggtaatggctacccccaacaaggtgaacgcttcggtattgaacccatccatagttgacgacttgcggtgatttcttcgggcgatatgccatcaaatttaaagaaaaggaccattcaacccagggtgtacattcagataaaggaagagaaagtcaattgtaccgagggggaaacgagcggcagaagaaagtatcccaatgatctcctctggcctcgctcgttgttattggaaccagaccggataaagaagcaagcccactcgttagtccacttatcaacaccaacgaatagaagaaaaagcaatgacagtatcgatctcaaatatccgttggcctgcttacttattgtggcgcccattaaactgaactgcaaacgcagtctaatatggaaatactctcacatgtgaacggaatttatgataggtccagttttgtcatgcaagagtggcagcatgcacaagtctcattggacagcgatggaatatcatttggtgctgggcccgggctatgggtcctaactgccgggggaaagttttaaggttgaaagcaccgtttgttccacttctagattactggtttttggaaatgtagatcggcagtcaaaaggtccacacatcccctgagtcgatataactttccctaagtgggaatgatcgtagcaaagggcgatttttcgatccaatatggagtaccctgatagacttcctttgtctgacctgagagttttttttttttttcggttacacacgaatactactccgtacggtcccgcatgatatcaactgggccaatgttgagaagcagcaataaaccgcaatgcgaacggggatttgtttgggttttcctgcgatctatgacatgcaaacagaccagctcagagacatacggagtagcgcagcataaagcttgcgtagtttagccaatcatatgtatgccattaggggaagatgccatacaattttatacccagggcaaatacggagtatatatgtatcgatttctctaatccacattctcttttgggttggtttgattgctgatcgagccggagattgctccgaggatatgtaggtgccaggagacttaggactagcgggctctcagaccagtcatatatatccgatcgatgccgttctttctataccgcgtcaaatgagtccaggagatatcataagtactgaatcaggccacggtttccggcacggattatggcttgacagcttccatttatccacggagtaataaccttaaccttgtgcataatctcaaacgacatgctactgtatgtttcaaattgaaatgtatgacatgttgacgatagcggtcttttccgacttccagcgacttggtgggtcccaaaacgggccgttcgatgttcatccgattctcaagcgacaactatgagccttgtactctgtactccgtactccgtacactgctgtattgttgtcaaataatttgcatgagatcaatcaattgaattggactacgaccagtagtcggattgagataccaaccgaaaacggcaacctgcatattgttgatcccggcttccacaaaattggtaatccaaacgccagccacggggtttccaccgtcgaaactatttaaaatcacagtggagtttggcttcacctcgctacgcacggagtactccgtactccgtagttttcttatgaaggctaggatactacctaagattagaagaaccgacgatccccgtgggcctggccatgctttgacagacgctttgacagcagggctaaaatagtcaaacgacggagaatctaaaagattcagtgctgattcgaattctcccgaagagcccctgacactgaaggggtatcggtacatctcggtacggagtacaaagtagtcaagtgcatgccaagcactccgtagtaggtagtctgttacccagatggggcaaggggtctgggactaggttcacgggtagccattatagaatcatcagcttagaatctctggtcctttaaatgtctcaggcccttttgaaccacgagctctgtctcaggaggtacaagccatgctaaagttggcgggaactgacaacgtcgtggggtttttaaggtgagttaatttaatagtcccaccattccatcctcccgggtgtcctgaacagcaagggctaaaaattcaaaacccaaaaaaagtactactcgacgctaatacttttagttatcgctcattccttcgtttccagtaatttggccgctcgtcttgtttgcttgtacataaagcatcaatcctggtcgcgcaatcggtttattttctgcctcttaaaacgaaaacaagggagtcttcaacaatggagaccgtggatcttgttgtggtaggcgcaggtaagttgaatcttcactgtcgcatactatttcgctgacaagcattggccaataggttggagtgggctctccgccgtcaagacctaccgcgaggtcaatcccggccacaatgtgctcttgttggaaactgccagctctattggcggggtgtgggccaaacaccgtttgtacaaaggcctcaagtcgaacaatatgcttggcacgtatgagtatagcgacttcccaatggacgaagcgacttttggcatcaagcctggacagcatattccgggccatgtaattcaaaaatacatggaagcatatgtacaacattttaactttgccgattgtattcgactggaacaccacgtggaaagcgcgcgacacaagttggacggaacgtggcagttaagcgtgtcgcacggagcagatacaacaataatcgataccaagaagatgatcgtggccaccggcatcacgtcacaggcatacatgcctacgttcgaaggccaggagtctttcggtgcgccgcttttccactgtcgcgatctgctgcagtatcaagatgcagttctgaaatctggagagcgcgcaaccgtttttggcggaaccaagtcggcctgggatgcggcctacgcttgcgcaacggcaggtatgaaagtagactggatcattcgcgaatccggtcatggacctatctggatggcgcctccctacgtgacgcccctgaaaaaatggctggaaaagcttgtcacaacacgcctgctgacctggttcagtccctgtatttggggagaggctgacgggtatgatgggattcgcagctttttgcatggtacctggctgggtcgtaagattgtggacgcgttctgggctattctggccgatgatgtcgtgcagttgaacgagtacgacaagcacccggagacgaagaagctgaagccttgggtgagcccattctggattgcttcctcgctcagcattctgaactaccctaccaatttctttgatttggtcaaggatggcactatcaaggtgcacatcgctgatctcgagcgtctctcggatcacactgttcacctgtcatcgggcgatgcgctgtcatcttcggcgctgatatgctcgacaggctggcgttgcactccaaacctcaagtttctaccggaaggcattgaccgcgagttgggattcccttggagtgtggatccgctgaacgaaaagctgttgaaagcggcggatgaagagattttgcgccggttcccccgacttcgcgatcaaccaaagccgaacccgaactacacgccgttagacgcgcagtccgaagcggctgtgccgcaccccttccggatggcgaagttcatggtcccactttcgctggtaaaggaacgctctctggcgttcatgggtatcacgatgactatcaacacaactctgattgctcagactcaggcactgtggatctcagcctatttcaaaggcgatctgaccccagctacacacgaacgctgcccactcgctgtgcgtgctacgtctgacctcaagacggaagacacttcagaaatcgaccttgcctgggagacagctctgtttactgaatttggcaaatatcgctacccgggaggattcgggcgacggaaccctgacttcgtgtttgatgcgatcccatatattgatctgatgctgggagaactgggtctgtcaccacaacgcaagcacggcttgttggcccggtgcctccagccatatggtcctgaagattaccggggtctggtcgaagagtggaaagctaagcaaagaatccagtaatgttgcgggtgtcgtgattcatttatttcattcatttcatgttgtctgatgtgtactagtttgttccccttttccccttcgcgtgtcgcaagtgtctccaagacactcccggttctttcttttacataagattcaagacaatagaatgatgttttctatactatgtgtgagtatgttatatgaacatgttataatattctttgataatgctcattttcggcatcatccaccatgacaaattgctccaaaaccgcaacaccaacgagacatgaagatgaagatgatcgtacatcacgttccttcgggtcaccacctccggcccccattggacgctggctttcagactcaattacctccccaaccatgtctcccgtccatctcatataatctttcccattccccgcgaccaccattcttactgagacattaatttccaactgaccatttccctctcccagatcatatttcagtcggaatccttccggtatatcacctatccgaggcggatatcgcccaccagtagtctccggactacccatcggtctcacggtgagaatagcggggtcacaggcggatataagcagctccccatctttggcaatgtagctgctcacataagtggcgttgcttgggtcattcatggcgagataactgaaccatacgatcgaatatggacctagacggccgtgaccccagtaccagctctggacagagtctgtaaaaggttgatcagaccaattctgtaacttgatcagccgaagtttcacaatttttccaccaggcggcaaaatcacttactttgtcatggtacccaggccctcggaacttcagcgtcgacccatggatctgcatgtcgacctcacccatggcgtcgggtatgagattgatccatccgatatgaggtgcaatctcaataacagtctggccctcttgaattccacagggcagattatacggtgctcgctttttggcaaatttagcaagctgtctgttcctgcgattcgagtcactacataccgaagtcaaggtaaaccgcccttcgacctgaagcttctccgacgcgacaataatctcatactgcgatagattctctgtgagagcagcccagctaaatcccgtcgaggcccactcgccagagctattggtgcccgcgccgtcgacgccagtcacggtcgccacggtcgccgggacagaatcggcaaagacggtgccgttggcgaacgaagcccataaccaaacattgagcacggaggtctcatttgcatcgaggaatggaaacccttccgcggatgaggagaagaatgtgacgactagggactcatcggggttggtctccgagacggcatcgaaataccaccattcgaacacggtgccattgattgaatctatctggggtgcatctaacctggaaattgattctttatcaagagtggtctctggcgtaggaatgtcaaaccgagccttgctagttccattttgtacagtgctggggatatggtaggtcccgctgcgagagtccctgccagcacggaggagatatggcaaatgtctctcgttgaccctatgctgactagggaatgctggtgtctgttgtgctagaagagcacatatcaagagcagtggaagcatgatggaatacacctagggaagaatgcttgatgatggatctcaactgagaaagaatttagtctacccactatcaattgggggcggatgggaaaagagagaaacgaggtgaaatatctcacttgcataaggtgccaggatgcagcagagctgatccccatgtgggcttcgccatatatagcaaaaaggggaaagcagcgggatcctgggggaatcgattcaaaaagtataatttcaatttccatcccaggtcaaagagagatggcgatcctttactggtacggagaatccttctatcgttccttggtttcgtgatggcccaacacaatgatgtctattttagtttacaatggggatctatacccttttccccgaagacacaaaaataggaggtcacaagatccattcagtagatacaaatccatcttagacagattcactcatacgcgttgtctaattagaatgagacagccacgtagctacctagtgagtggctgagagaaatcagcatagatctaacgaacttccttatttcaaggatcaataggaaatagatagccaatgatgattgacaaaaccagggtttgaaagctgttttattaaataaattaagacgattaatatacttcgattggaattcctcgggatatcttccatctcataattgacgcaggggtgtttatataccgacattgcccatcccattaacatttcgcttaatcgctttaaatcacagagaagcaggatagatacacacgtcacacatgagtctgataagcacatatagtaaacataaatccggataggggaaaaaaagggataaaaaaaaaagttcagaccttcccatgatgcccaaatcacaaacccttcgccgaagctcgaaataaaagaaaaaaaaaacacaaatcaaagtcaaatccggtaagaaccccgactcccaatgccttggtagatacatacatgtcttcaaacatcacccccataagatatgcatatagggagagttcacagcaaggacgaaagtgtcacaggcgggaagactggaacacgttcaacctcgtccattaaggaggggactgccgtcttcactccgcccttcaccctttatatcggccccggtttggttgctattcgcatccgagtcgccgtcctttccgcagcctttcacaagaatatgtcgctgtcggcaaaagtcagtatgtgggaattgtcatatgagactgcagatgacataccttaagagcatccttgcgcgagaagcttttgtcacaatgcgagcaagggaaaggcttcacggccaaatgaatacgtttatggcgcttcagatcgtgattacggttgaaactctgggggcactggtcgcatttgaacggtcgatctgccgcgggggctgccatgccgtgcggtggtggatggcccccatatagatgttgagagctggcgacatggccactgttgaatcctggtagaagcccggtttgcattccgcccatcatcgacatgggcccaccggggctgtgcacgttggtcatgacgggaccgttcatcgccgggagagaataggagggccatggctggcggggatatcctaagggcggttgcccggctgatggactgtgaacaggcattcgtcctggtgggtggatgccaagcccggtggggccatacatgggagagaagccggcctggtgaggactgtgcataggaggagaaacggcatacatatgctggtgtttgggggcatatggatcgttggattgcagtggagcgggggatgtagcgggtcccgcatggtacatggtcatggcaggttgtgacacggagggaggcatggttgacggggcgggtaaagcttggtaagataatgtcggcccttcatatgggtgcggcaacccatccgtcgtcggcggcgatattaccgatgagcgctgcataccggacgacggcgagaaggaacttcgagccgagtatggatttaccccggatccccaggactgtccgtatggattggcggctgaccaatatgccggcggcagctcggaggacgcgcctgtggaaggagccaatggctggggtgtggcgtgttcccctgcttgaattgtggcgggtggcgttagtaagttccccacgctcacattcactggcgcgtgggagactgggggatgggtaggatgtccgtacttgggtgctgccgcgccagcacccaacgtgaacgggggaggtgggagctcaaagctgggtaatgttggggctgcaggacgacgaatgttcaacggcggggctgacagcgcgtctaacgctggccccattcccgccggcgctgctagagtcgccagattggcggatgggtccctcactggtacgtagaattcggggtcgttgatattggagagctggccgaaagaagatccgttcaacgcccaatctcgatcgccaggtacggccccagaagggctggtagaatccaggaggggcgatcgtcgatcgctggggctcgcgatcggtatatggaagagagtcgagggactccggttctccaagaaataggggaatttccggagggactagagaactctcgaaataaagtgacaatggtaataaaagaaatccgaaaaaagacacgggaggtgagattgtcacggtcgacgaaagcgcgtgtagtacatggtctcgggggggagaaatgagtgaaagtcgaaacactaagaaagtgaagctgagaggaagagagatgtggggggggggaggtgggcaaaggaccgtggcgttggaggcgatagcaagcgcgggggaagtgttatactaataagagatgtcaggagttgcctaggtataattaacagaagaagcacaaaagtaaataagatggatttttctctttggggaatggagtcgacgcgggtctagccaggtggccaccgtggggaaaggaatgggataatgaaaacagtcgtatatattgtatattaaatagaaaagcacggaaaaaaaagggcgaaaaaggcgagcagaggggtgtcagcagaacgtggttgacagctaactaactaccggttggcttccagggctgttccggattgtcgactggaatttatattatttgtcttgatatatacaatccagggatttggtttcttcgtgcctactttctgttatcaacttcagaacaagatagcccacaatatatgtatactacctatttgatagctgaaaacccaaaaagacccttcttcctcgagggaaatcccttgcgtccgactgatcgcgtgaaaataaatgcgctagtgtagggactccggagagaatctgtgctagcaaaagagtggatccggctgagagaaagaaatttatttcgtttgggaaaagaaaaagggaaaaagggaaaaagaaatgggatccatacttttctactatcacggtaagattcccatccaataaggagaccaacatgtcaacgcacggacaagaccggaatggccagaatacgagaagcccatagagaaggcagaggcaagcgagcttgtcttgccggtcattcgttggaaaaaaaaaacacatgatcgcgcaattcagttaagctgctttttcatatttgtctttttgtttgagcatccctgttataatatacagcctactcggaccagaggtatattggagaccaaaccgccgtacctaggtatggtctatgttgtctatctctggtctgcggattatggtcagctgcacttcttttttttgccctttcagcccccaatagccaaactaaaagctcgatttgattggtccccggagttcaccggccgtggtagcttctttcgtttccctcgttttggctttttcgctctttttactttggttcgggccttaaaggtcacctcaactctcccgacctctttccgaaagccaatcgcctccagcatccactccctcgggtttccctcgcccatagatctatatagatactagtagtgcttgggtggcggaacgccaaatgaaacgggtctcggctccacgcgagaacctcgcttcagtctcccgacagaacatgtcttatcctccaatcaaccgacagagtcatctctttcgctgccttctgcacggacgtggcagatgcttatgtagggggaaaaggggggacatgccctgtcgatcgatatctatcaccgtagccatacgtactctgaatctacataactagacaagacatcaaacttgacagagctgatctgccgtaaacaaatcataacgtggtcagattccgaagacgttgtagatatgtcccgaatactccgcaggggccggtggttccatctatgcatagctggttccttggcacagcttagacatgtccattggcacatggaatttcatattgcgatccggtccgcatttcccccgtattcggtagcgagctcggtgctctcaaaaagaaaagaagaaaaagaaaaagaaaaggggggcaagtcttagacacgcggcggagtcacattcttgggaactgcatacctccgcctaggtatgtctagccgacgacagacacagcatttctccattattgtacattctacacaatccatgcaatatactgacgtttgttagacaatcccgatttatcttcgattcaaaaataaagtccaccgcgtctgtagccgcacgtcgcctgcccgaaaaggttgatatcagcgacgatcggttgatcatcaacaacctgtggccccatcgtatgctggttcccggttgatcggcctcgcactgccttttctcggtttggaagtgcaatccctggagctatggttcgcagccgattagtcgatcctctcatgcaaggcggctcctacagtccagatgcctctcccgatgtgacagcacgcaaggatccacctggctggttttgaacgccttagtgtcgcctgcattcggctcttgccggcgtggcttcggagaggctcacggttggcgttcacgatcgtccccgggaatggcgtttcgtggaaggttgactattcttctcgcccgggagatctgcgaccatgagtcttcctgcagggctgatgggtacaatatcccggcctcggtggatttgagggctcacattttacggtgtttccaaatatatcgactatacggagtaatgtgctgatatataggtctcaacctcaacaaagctaatagagcactggtctctccttctgtttcaagggctaggatcactgcttcccaatcagaggctaagctagagcctccctgtctcagcaaaaaaaaaattctatgctttttttttgctttttatctctctgtgggaacagcctcacgagcatttttcggtcgctgtaaaatctttccttgccgcagatctgcttgcattgtgttgccttgggtgtgataattaacaagagacgttaattttcgcatcgtgttgctctattgatcataaacttgaccgattcgattcgctgaccttatattagtctctcatggacctcataaagctagatttccggtatgacagtctccgcggtgaaacccttgagtggtctcattaagacctggtgacgtttgtgatacttgtaagttgttccctttggttgactgcaagaaataagagtttttcgctacacaggcccactcagtaccccagcttttcgagcatgttatctaactggaatgtgtaacttaaatctcattgtcaaccatttgtgctacttgtcttcggtgctgtatataaatgacatagaagcgtcggccatggtccccatatatatttccataggtcgattacccgatcgcataagagaccgaccaaacaggccagatggatcaatctcgggaattaagccaggaatagaaaataatatagaagacaatctaaatagccttgggatgttctaattgcatcgggctttgaattgccgagtgttgctccgatgacgtcgaacggcggggtacaacaacctggagtttcattcctacattcacagggttactttcttcaacttcgcttttaaatcaaaagccaattactcgtatgttcgtttctcgtccaaatcaccccaaatgaaatacaggccatttctgaccttccaaagaccattgcttgcaactaaacaccgctttaacacacctcccttccattgcttctccacaaacatgtctggaatcagcaaagcatgttgctcgttcgtgatccccataaccattgcactctgtgatgccccaatttcgcgctgactatcaccgtgcacagaatccctcctattgtatccaagggctaccaggccaaaggagaatataagaccatcaacggcctgaagacctgttggttcttgctttcgccgacctcttacgattgagctaatgaaattactttcagatgtcaccggcccagaatcggccaccaaggctatcctggtcatatatggtaagccactccccacaagaatttcaacctggccattaactgacacaattgtgtgatctgcagacatcttcggtttcttcgaccagaccatccagggtgccgacatcctcgccaattcgaccgaccaaaaatatcgcgttttcattcccgactttttcgagggtagccccgccgacatttcgtggtatccccccaccacccaggaacacaaggagaagcttggacacttcttctcaaccaaggccgccccaccccaaacactctccaagatccccaatgtcgtcgccgaaggcaacaagctagcgcctggcggcaaattcagctcctggtcgatcctgggtttctgttggggcggcaagatcgcctgtctgtcctccggcgctgataacaagctattcaagacggtcgcgcagtgccacccggccatggtcgaccccaacgatgcaaaggccgtgaacatccccatggtattcctggcctcgaaagacgagcccgcccaagacgtcaaggactttgaggcaaacttgaaggtccccaagtacgtcgagactttcccaactcagatccatggctggatggctgcccgatcggacctggagaaccccgaggtgcgcaaggaatacgagcgcggatataagactgttctcgaattcttccaccagcacgcgtaaacaacagaaaaaagggcatagttgactctggggagttccttaccgcggaggtttgatggtggtatgcgaactagatttgaatggagaatgatgtcttatgacaaaccaaattaccttcctatgcacaggtacacatagcgtccttctagtgtatgcacaacaagcataagccgtataactttgacaaaatactattattaaaaagctaaccttgaaacaaatctcgatgactcatgtttgaagatacataaggtgtaaataaattacttgggtataacgacatgtagccgagcatatgtaatttaactagttcgaacataactatgtacgtatacatttgatatcgcatacggagtacgtccggagtacctaagtaagatatgtgcatatgtataactaagtaaaaagtgttttactttttcgaatgacccacaacatagttgcactttgtacaatccgccagtcttccaatatcggccaatcatctcattcgcggatggcacctagacgggtgcccaggtggatataagttgtatatatatgagtccgcaagacgtcatcactttccgaatcttaccttaaccttcttaatcttcttaaccttcttgatctccttgatccccttgatccccttaagctaccgttcctttattttacaatttaattctgggatctataaattctccgaagtcgcttaagttgtgcattcaccccccaaaaaacggcgctctcacctgtcgcgtttcagctttcagcgtcaccccaccagccgcgaagggcggagatcggcactccgcatatacttgatttatttccacttcttaatcttttacttttaccagggcattctatctagaagatgcgataattgcatcttcacttggttctaatgtcttccatgtttggccgccgtcgttcctcagatgcagcttctcctcctgctcacaatgagtttgagtcacttaagcgatcattatcgcatcgccctcccgactctccccaagaggatcatcccaacaacggggggttccgaaacctatttcggaggcacattaatagtccagacataacttctccaaccgcaacacaagtaagaatgtcttaactattttgtcattagaactgttagctcatgcgaaacagggaaaagaaaaatcaagtccaattgaggcgagcgcgccggcgccgcccaaatccccagaagagagtagtggccggcacgatgacagcaaagatccccatggcacccctaggcacgactcgcccgtaacaggggccgagccaacgcaacctggaaatatccatgatcatctcgaatccagattggagatggcgggcaaaccaaaagaaaacttgcctgttgcccaccacaatccaaaagaggagactaaactcacggcgaaagacatcaaggcaattttttctggggcacctcactttatgctggagagaggcaattatcatttgtggtatccccaagtgatattcccatgggatgatcataacccggtaatccaacacatgtgggatcgcaagccattaccccatgcatcctttactctgagcacacttcacgctcatctgccgctcccagacgactgggctatcaagggtggcgttccgatcaaagtccttgattggcgccaaacagacgctaccaacagggcaacgttcgacgtcggcatcttcgaagtacccaacatgctgtctaacaatggcaaagaacctggaaccgtcggtttccggcactttctcgaattacctgtggccgacaccgtccgatacgtgggccccgaaaagccaaagaaatctccacatctacagcaaatctcgaccatggcggcaaccgtggcgtttgatataatggagggatatggaaaaccctattcgcaatgccgaagcggtgccgtccacgatcgacataaactcatctgcgaaggccccgaggcctggaagcgcattggagtacgagatatcaaccttcgaactctggtgcaacgcctagaacatctgcgccagtttcgacatgagatgctcacagaggggtcgacaaagacaattctggatattgaaagtccgcgcgagttgcacgacagcttacacacacaattccttcacccccaagctgccgacattatagggggtcatgcgcaaagcatcaaatcccagatcaaaactttgtcaattgtgctggccaccccaggcgcatggatcaatttcagtctccccgaatggcgctttcgcgtagggcaggtcctatgggaggcatccctgcatggcgatggggactgtctgggccccagttcaggcgatgagaaagtaccgtgggatcttatgatcaagtccgggatggagcgaaagtggttgctgatacagatgctcctctcggccgagttgcttcttcgcttggatgcgttcgttcgagctggcatgttgcgtgatgcgcactctggccatatcacgatgcgcgagcttggagaattcgagaacttgcgagacggcaaactgaactgggatctggttgttgtgcgccggttcctcagcagcctcgatatcagttgcccgccgccacaatcagggctatctccggatggctcacgattgaaactcgcagccacgaagtcgcatcgtttttcacttttcgaaaccatcagtcgacatagtccgccccctgttgcggatctaaagtccgcctgggactgtgaactgagctcttcgcacattcggcaacaactggagggtctgtatgtcttcgcagaaaacgttggatggccaaaattggctgcactgaaagctgccatggagttcaaacttggagaccctcacaatccggttctgccagccttagtcgttcatgataggtggggatgggaggagatatctcaggagatgttactggccaaggaggatatgtacacacgagatccctgccgtcgacgcgtcaagcttagtggctctggcgatccacagtccaaaacgttaggctggatctcgcgctcctggctttccgggttcgtcatacctggagaggggattagtcatcttctcatggcgacgctccttgagaatgacgcggatgcaatggataaactgggatcaattgccaacctctatggagggttcgtctatgaccaacggagttggtggagcaaagcatgcgttgccggacgtgtcttgtctagttcagcgggagctaagacatgcatggggtggatcagcagcgacattatcccccgcgatgcgattacaggggaaatattccagtgtggatggcttgaagtcccggttgaagaggtcttggagatttcgagcgtacctcgaatcaagcaaggaaccaagcttgcgctggaatcgtcgccgctaggcgcgggagctatctcagcaaaggcctttacacttccaacggataatcctgagccaagtgcaatatccgtcaacatcgaaggcttgaatctgtctgtcaaggattacaggcctgccggcgagtttggaattacatctgccgaggcatccatgtcgttcttaattggaggcgcaggtggcgctggagtttcaactacggtttctttccccctcaagtataatgttcgctttatctccgcccatgagtgctgtccaccgttggggatcgcttctcacaagccatccgaccgcgagaacattgaaacccaacggcctacaaaacccgtgtccaagtactcacgtctaccggggcatcctctgcacagctcttatcggtacaagtacgtttcgttggactctcttccctctgccccgacgccgcaattgacatcgctggtaaccccggaggcaactcataccccggagattattgtcatcgacgcgcggggcaaccgagacagggaaacgttcgctcgggcgtggtgtgcttctgttgggtgtcatgcgatcataagtcggtccggaggaactcgtgtgacaagttgtgtcgcgtgttcgataaggcaagcgagggcgatggatgtaatggttgtggtacgtgtgagcgaatgaggtgaatcgagttggtcgcgcatgttgctacttctggaggcgccattcggggactgtccgtaatagagcccgaaacacaaaaggtcataatcgcgcaaaccgacctgtttccatgattgagtacaatatacgaataataagttcacggacattggcccccttttgggaccggaaaagcctttggtggcttcaacgggtttcctctccggagaagccgtgggggtaaggggaaaagccctcccatcggagaacgccagctagagaacggtaaataccaccttccttttctcctccagctgaaaacaaataaaattttaaaataaaaataaaaacgccgcaaatcgtgataggggggaaacggagagaggaatgggctttttcttgggaggacgcgtaaggcaggttgcaggttaaaaagggtgaccctcccccttgagggccgatggccgaatggagtcaagggccccgaagatggtgaaacagtcggtctaaagctgggaggccagtgagatctctgtattatgggtccacagggatagatatctccgatctcacacaatttatggcatgtactctgtagttggacgatgtacggagttctgttactatatatatatatatatattgtatatgaagcatcttgtaggtagaggaaactgtatctcatctgcagagtcctttctcccatacatattagatcatatcgtcttctcatctgcatactcatgcattcttatgcaatgcagtctcttgagcaaattaagcctctaccgagacttcatggttcagggatgtagagcctacggggtagacactccaaaatggcactaaccccgaaagtatcctggtagaattaaaccatcggctattccgtttcctaaagaacgatcatggcagcacgcctagtacagtcaagcccgttacaatcgaaggatcgtcagagcaaatatatttcgaaaccgaaggtatttacgcccggcagaattccaactaaaaaaggcgggacatagcactaagccaatagaatcaacccaatctacccatcacgtgggcgttaagcctaaaaaaacacattgaaaagaaagtttgggcggactaggcctaattgggaagcctcggcgcatcaacgatggtattatctaagcgaatcaattcagggctggcgcgcaacttctttggatattgtcgaggtttacaaaaaagtgggtcgatttcaacggggttttggctgtagctcatagggtaggaatacatacctgcacgccactgcggagcccggcagttgggggttggggctttgactgctaatcccagaaaggaatagttatgggtatttctcgaattgtacaagactacaatattaatatgtacctaagtaggctagttggctagtagacgtgattaagcgacatctgagactgtaagagtcttctacatctatccacccacatgagtgtaactattcttggctaagattagcaagatctggctcagccctggactggacccttgtttcagtttcaaacactttggccgatcgacgacgacgcgacgccccgttgggctttacctaattattcaagcgaaccgagtacgaacattcctgctacaatatgtacggaatatattgtaccaatatattctcgtatgtgtcctatttctgtatggctggtgctgcaatatatgattggagtcgcttgcctcacactaccccgtactgcaagatctatcgcatttacattcgccgcgtcacgatacatgtactgattgttcagctgcagacaaatcccagctgcaaagagtctctgttgtaagacccaatagtatcggctcttgaccatttctcaagaccccgtgctcgtcgatcttcgaccagtgtgtgttaaattgcggggccagagcgtgggaagtccagtgttggatgtagtttatcttcgcaaaatggcggtggaagcatcccattaggcaaaagcttgaaggcacagcatgtattggatagtatgtatacatgagactctgctggtgaattatacgttgtcaagtggcttggagagcacgagagtacggtgatcggtggcgtttattggccttgaggggttttgttgacgtgatacgccatacaacagtatgaagatcatcgtccactccagtccacttgccagaacgatattcctcaagccacgccggacttgacacgttttcctcttcattttaaccagtattcgttgataatagccaccccctttttttttcttctgtcatctgttcgaacaggcacattatcagacggagtataataagcactgatcttttccattcaatcagaaccttcccttctattgtatgatttagccttaatggaagctgagacagaaggaaaaagccccgagatgagccccatacgaataccaagacccaacctgtaacacgctaccacatccagacgatccttaatcaaaccttgacctgccccacacagagtttgtgagatcgcttgcaattcgcattttgttacctatgctgtactatattatattatattattatttgtagtactccgtagtctgctagggctttcggacggttatcctacttgggtgtagttcagggctgtgtagatgcagatttatgtctaccgattggtttgcaaaatatatgatttattgtagtagaatcaaatcttaaagggccacgtacgtgtttctagaaaatgtcgctcactacgccatcatgaacgttgaaacagtgagattgtcctatgagcattggatgcacggggtacaattaggtagagactgctcatccgaacattgtggttggatccatgaagaaaggtccgtggtcactgattggtccactatttccatggatcttttgacaggtttcctctttttttggcctgataaatgcaaccaaatcggattaaagctactggaaaaggggcaaaaccaaaaccacagaagataatttattattcttttttagataattcaacgttatattaaacaaaccacaagaaaaaaacaaaagaaaaaggatccaaaacacgaaccaataacctgatacacatcaaccgtggaccctgaatctgtttttagcacaaaaataaccgatggttcgtttcagttcatatcatgttacggagtaaaatatgggatagcgtgatttccagtcttctagaaggccatgtgggcaacacaacttatgctttagatcgaaccgcacagctccccttcgagaagccccctgggtttctaaggatcagcctgtgaaatgaccggagacagaaggttcttcttgatggaccctcaaatcaacgagcctattggttctgagtgccgacctaagctcgcgtcactcactaatcacctagtcgggacttgaaggaagcattccccagttcatcaatgattgacaggcatccttgttggccctaagcctaactggtatcgtacactttgagcggccactccaacatccacacatccccactgttgtcagggctcccagaccatggttccttgtctctgcttcatttcaagaaccgggtctacaatacgcaatcaggggcattggaaagttacctaatcaaggacggatctaacggtgacaggagtctagaaaaaaaaaggagctacgtaggtgaaaaagagattacgaaaaaaggatcgaaaaggaaaaccttgcagaaaacaagaaataccattcaaacgccagtaaatctagagcattaagggaagttatccgcggacccctgaactgatcatccattgacaatgacctgcagttgatttgggctaactcgatacatccgtgttagtcttagttatgagagccaccttgttccacgtacggcgtgatatacatgcttgaaaattaaatttaatcaaaaatctcagggaaaaaaaaaaacctcccaaaaaaaacccaaaaggcctttgggcgtttcaccccgcgattagcttctacctattggactatacctaccatcttcgatctgctcttcttctcttcacaccgttcgcttcatattcgctccttttgaataccctaattttgttttctttttttgttttctctctactaatctctttttggttatcgtttgactcgtccccctagtgtggtttcttcctcgatctcaaactgggccacaataaacttctaggccctaaccccgtccaaatccccttccacgaacactttactataattatcattgattaattcgcaattgctggacttgggaagtttggaactcccagcctggaatcaatctatcctcgaccattctactgcaacatcacctctatacttggagacacacgggccctgacatacgcccgacatcctcgctctgaaacgcgcgcaatatcatacttgatccagtgtggcgtatgtggatcagaacttgagaattgaagcagcgtcatcctctggaggcactcatcggtcatactctctgtgcagtatttgtatggccttgcgcggactcttgtcgcatacacctttgatcacatctcgaggtactctcggccggctgcttcgcaaatcacacctttcgcttcgctgtggcttttgatgcaccctcgaccgatacagcgacagaaccgtgctcgttggagctatgccagtagctgtcgaccagatgacatcgacagcaaactcacaaagcaccatggacgcaaatgataagaagcgcaataagttgggatatcatcgaacctctgtcgcatgtggtcagtaatatatcccacgcacccatcgcctgtttgcttgtcgcctttctctcctcgttttcgaagtgcgaaactgtgtcgatcaggaggaaataaacaagccatcgtttcgggaacggggtattcacatgtgaccatgttacttatacctttacagtgcactgtcgacgacgaaagatccgatgtcttgtagcgccagatgatacggaaggacgatgtgaaaactgcattcgcttgcgaaaggactgtcagttttttccagtggaccagcaaccaccgattgaaaagaaatcacgaccaagctcgagattggagacaccctcaaccgagcgctcaaacaccacaccaattgcttcctctccgactaatttgatgcccgaccccgccgagactttctacccataccagcctatgccgatgaacgcctcgtctgtgcaggacatgtcaacgtacaacgtcggaatggttcaagccaatatgagtctaacaccaggtaggtttatgtcgtctagacttctctgcactgcaatccaggttcattcgttgactgactgatctgaactagatcgacctatgggaccaggagactttgctggccatcaaccaatggacacgggggtctcgtgggacgaatttacgactatagcggacccgcaactgttgaatacgatggcagccggaaaaggtcatatgatgaatatgtcacccaacttatggaatcccgggaccatacactcaggcctcccacccgcttccccgatatctgcagcatcttcaatgggaggccaagcacagcctatgagccagacggcatacgctatgcagccagatggaacagtttggcaggtcccgccgccaccaccacgaaccatgagctatcctggacaggaaatgggatcatcataccctgatcagtttcacccacaactgcccccggagctcaaacggagaatgaccacacccgcacaatctctgtctgccacgagtgccatgggcccacacggctcgccaggcacacctgagatgcatacaccaggatcggtttcatacccaccaggaatgagctacccgcaatggcaggatatgagtgccatgtctggaatgagcgtggtgccatatcctatgtactctggcgacacagttccacaacacgcatacccgcctaatcctgctcctatgggacaccccggaggcccgtcaaagccatgaatattttcattcctttcttcgacatattatacctcctctcccacgcctaacttttttttcgcatttattcgagtccaagttccctcacgttgcacatcacattcctagacagcctgtttcatttctaataccccgcgggacgtacacatactttttacccccaattggcatttcatctattttcacctcatcctcatataccgtggcgggtctgctttgcagctggtcattagcgggcgcaagggttttcgggtggcatttttactatgatttcttgtctcttccttttctatcatggcttcatcccaccttttcattttctatccatttcctcgggctctttctacccggtctgtttttgcgtgcttttctctatctcatctggtggtattttacccttggttgtatgcggtatgtttgtttctggccggtggttgtctggattggagtgtgatttcacctcatatgttggagcttttctttgggccatcgatatagacttccttttctcttcgtttcctttggacaatttatgtgtaatcttctcaatacatgatacccttctgatctctgtcgcttctgtgtcatcaggaagatgcaactcctgcttgcgggaaagatgtcgaccagctcaacaaccaatagaattaacggttggagggttgatacaatcttattttctctggttctttgataaggcacaggctggaaatgcataattcttgtgtacgtatttcacaataactgccctgcatatctatactttatcgtaagactcggccttttctccagagttcttgtctatcctcaatgtactaagagcctacctgtactatgagcttcttgtttcttgcttacagaagtgtgcatgtatggtgcacccttgctatcaaaggttcattgtaggtcacacaatcgttgtacggagtactccgtacgaagaatctcgcttgggtcgattatttgtggcaaagctaagacaaaaatgagagtagtgatgcataatacttcgcgtacaaagttaacacgtcatgacttcttgacttctttctcgaagttccattggcccgggatccttcaatccgcacacaaaagtcaagtcgggttattagctcgcaagagaagccaatcaaatactcgacactcgtcaatagtattgcgtctgggagggacagtttatatccctgagcacacgaatatgccaaggccatccgagtccgtgataacaaatcctgacacagatagataggcagatagataataagcagatagaaaactgggagaagttctgataacaaatagccagcattgatttgtacgtcaatgacctcgcgaatgcgacttgataggacacttgcaggaagatagaataaagaagagattggcaagataaaccagagcattcggattgtcatgtttgaattttcccttgcgtgatctgctaatagcgtcgcgtcagtgttgatatgccagattgcaccaataatcccatatctgcgcgagatgtaaccgggaacctaagattgaagatcggtcacatcagagatatacatacatagtcattatctcacagacaagagttgacgtaggagataagggtcgattgtccatttacagcatagcaaattaacgccctagatccgcattggaggatcccccggagatcgatatgaagtaagactctggggttgaaatctggagatagcagagtcacagcatggcggtgtacaacataggtgatagatccaatgataacgcatcattgtgtcaggaaggggccttatctccctctgcacgttcgaattttctttggagatacctaggattctccctgttggttgcgatatcagtgagcgcatttttggcccccttaggtagcgtcacgtcttatcgagacgggcttggtagataaccacacggcatggcgtcaatgttcttgggttgttgagtacaacgtatatatagtgcattgtccctcggggtttccttttgacttcggcttcacttcggtgccaactcggccaactcggccaaattcaaccaaattcaaccaactcggtcacctcggtcaactcggtcggtcaactcgactatgtcaactcggtcaaatgactatgtcaaaccatcccatgtccgttcactcaaaaaggaacccatgtttagtctccttgtgtctccacgcttttggcctctaggtaaacgcttctatatggaatcagtcaaatgcctcaaccttcctaaagattttctcgcgtaaccgcaagaaccgcacagaaaaaaaaaaaaaacaccgatgtgggagaagaccgccaaagtacagagtcagattggcgtcgcgggctgagtgtgcaggacgccacggcccacctccccagtgcctcgagggcaataattgcccaatgctttcccccgcgacatacatctccgggttggtccgggtgcctgagacatgactgtgctttcccccactcacatccccgatccaaaatggatttgacaatatgattagaaacatgtatgacctgaaggtcaggtactttatgctaacaagaagagataaggtccaaagttccaccgatctgcattccctcaaagatgaccatggttaattacattctaattacattcctatcagaaccttcttatctcggattccccgacttgaggtggatcgtggggccaaaaaaaaaagagtaggactccacggcatattggagctgattactctgaaggtgccattggatgggaaaacatcgtcttgtttaggcctcgcgtgcctccgtatcccgatccgggttcccgtctccacatgatttgagtcgaccaggctcccggggacgtttgatatcaaattgacacggaattctgagatcgactcttgaacccacgaggatggccggagttgtaccataaacccgacttgttagtgccgcggcggtggcaaactcatggaaagagagggaagaaaagcagggatattaaccggtacggaggtccgcctcaagatcccccgtgaaggcgggaaacagaaacgaagaacgttgatttgcgaagttgtcggttgccttcttggtactccgtactttacctcggatgggggcgaacgtcggggaaattccgtgacaggccgtcctgtatatcttctccgtacacgggtggtaccgttctcgggtaatatagggatatctttctgagcctctcggtgagtctcgacatccgtaggtgggattgattgcttctatattctatttgatatggcctattatggattatgtgcgagatatgacaaaatcagttggaagctgtgaaaagcagtccgaattcgcttcttattaccaagagaaaaacgaacaagacttgtagaacgtgccttatcttttgagggcccatccgttactccgtttactattccgccccgctgcgctaagagcatggactataaacctcgatattaaaacatctgatcgtgcttttgttcctgcggtttcttcatgggtggcccgagagctacttcgtttgtctccaaactgtcctgtagtctacaatatcccgtagaacaagagacggagagatcgagagcgcatgcgtttgttcgctttcatcccacgagacctctttgactggaccgggtggtgtactccaccattaacgaacagtacccacttatcctgcatctggactcactccggggccgctaaggaacatgatgttttgggagtgccatatttctcctcaagcttgtccgattccaactagccataggaattgatagtacctgcgtttggaccggtcccgactcacaggagcgggcaaggtacattagtttcaattttagtacggagcttgcgaccactcgggccgatgattattcaagatgccggtcacatctatagttaaacttggtcaacaatacggagtacccatgtcagaaggtatgccgagtatgcagagaaagaaacgatgcccttctagatcccgaagtactccatatctccatacttgattgggggaaaggtctcaatcggtcttgtacgtcgcagtatatgcaggcggaaaaaagaaagaaaaaaaagtaatcggctttgaagaagacgggagtggcacatccaaatcatggcaatcgagcgaagcgccgtaaatcgggcatttccccgtgacaacagtaatactggtatgtcaaattacatatagattacatagattacaagttacttcttgttcagcgtcactctaggccctcttttgacatcatattcttcttcttttcctcttttcttgactttatttctgttcagttttatttcaatatcttcaatcctgaagtacgtctgattctaactcatacctggttattgtcgttgcgtggtcggcagtaaaaccaactgccctccgtttccccatcttcccacacgtttcccttctctcctccctctccatctttcatctttcacctctctccattctccgtcttcccttcggtcattcttgggaggattttctcttcccatcaaaagatagatcttctcggggcatgagcgtctggagggtctagccccccctccacgactcattaggaaaatcccaagtggcgttgaggctgggtggtggtttccagatccatcgtgcgttcctctcatcccagtcgtcagtttaattacctattatcatatattattatcataagatccgtcccgtgctaataggcattttacgttgacagaccctggtcgttggctgaatcctgccaatcgtctctcgcttggctgcattcgatcatcaacttccggcaagggtctcgtttacggcgggtacggaggaatttcaatccaacccactttttttttgccgttcatcccctccccccgcggtcgcctctatttgaataacctctttcctctcattgaaaccctacccatcggagattatggacgggatacatcacggagggcacgggagagcccggccttcccaccctatggccttccccgacttcgacgcggattcccatatgatgtccgacgacttctctttcgatactcccttcagtccctccggttcctccaatgccaatgataccgtcctcggcaactccatctttccggaatggacgaacggtgcgtcgcgtggcgacagccctgacgagatgcaaaggaaagatccgctgggcgctcagatctggaaactctacaccaggacaaagtctcagttgcccaaccaagagcgcatggagaatctgacatggcgaatgatggccatgaatcttaagcggaaggaacgggaacagcaggctcggtaagaaacactcttatgaatgctaaagcacatggctgatttactgatgtccgaatagtgcctcggaaactttaagcccgacaccgagcggcatcgcgcagatgcgcttgtccgaccaaccatcgcccgctggtggcgatctagcacacgataccacttcggatccaatgaatctagatgacttcatcgttccctttgattctcccgccgaacattcctcgcatcctattgatcgacacttcacagcaacacccactggatcaattcctattaaatcgcgcaaggaccatgcgatgatggattcgtcgaccgctgcctcattccctcatccaccccaggatcagcgaacaaattccgagtttggatacgtcgcccgtcgggtccgcaaaacgagcgtcgacgaccggcagttctttgccggtttgtctgttccgacgcgcaagcgccctgccgaggcctcgcctcaggttcccccggtatcaaacgccatgatggcacagcactcggaactgtcttctgcactgccagactactcgctcgatcatccaccttctgcctatgctctttccggcaatggcacggtgggtccgcgcagacctcaacaccatcacacgcactctaacattccctacgggttggatacgtatggcattagcgaagatcacgggctcaattcggccggctcataccagcaaaatttccatttttcgccgtcagattctccaatgactgcaggaaatcctttctcgagtctatatgcccagacgccgctcgcctcgtcgcttaactcaaccgagttcttctcgcccccgccttctggctatcagtctactgtgtcaaccccgcaaccgatttatgaaggggagcaatcgatattcttttctgatgcgccctccgctgaatcacacacccagcgccgcattcctaattatatccagcagcgccagtcgaacctgtctgcatcgctgcagccacgttatatgtacaacatgtccaacggcgaatctcactcagggagtgcagttacagggccaccaaccacccacgtgtctggattttcggtgccaccaccgcagcatatcaacccatcacaggtgcttggccatggcgaattctctacaacagcgccttccagtagcatgtttactttcggtggagactcagacaacgaagatgacgatggcaactttggtgaaggtggaggcatgactatgccaaatgactttgcctctctggatgagtctggtgatatgagcgccggtcttcattgggacgggggtttccccggatcaatacactcgctaccaggcttcaatgctcagcaccgtaagcacgttacaataggatccacggacatgatagatggcccacctgaatggaaccagggaggcactcttggtcgtgcgcacggatccgctgcttcggtcagcgaagtccgtaaccaaaaccaggatcctcgtcgctacggaaaggttccccgcacagcatcgacgcccaatgctgctgcactactccgtcagagcttgaatggttcagccagtgggcctccaacaaaccatccttcgccaagcacccctccagagtctggtcttagcagtgcggtgccgtcccggccaggtagccctggtgggtcgaaaaacggtgacccgaacgcgggaccgaccacctgcaccaactgtttcacccagaccacccctctatggagacgtaatccagagggccaacctctgtgcaatgcatgtggcctgttcctgaaactccatggcgttgtccgaccactttcgctcaagactgatgttatcaagaagcggaaccgtagcagcgctagcacacttgctgtcggcacttctcggtcatctaagaagtcttcccgcaaaaactccatccagcatgccccatccacatcgatttcatcccgcatgaacacttctgagtcgccaccctcgatgaatggatctagctcgttgggtaaaaccggtgttgtcccaattgccgctgctccacccaagtccggtcccccggctggcgttgctcaagctcgtgctggtgtgcaagtggcacccaggcggcagcgcagactcgaaaaagcaccaactggatccgatccagatctagaggacagccctaagtcggccgctcctccgagccgatccaaagtcgtaccattagctccggcgatggcaccacccgctgccgcaaacccagcgaatcacagtatcgcgggtgggcagggtgcgagtcaggaatgggagtggttgacaatgagtctatagttggcttctaccacatggtccttttcttttgctgagttttgccgaggtgtgaccggttaatcacctctataatttcacgtattacacgacttatgtccccggcggtcgtggctcctttattactcccatgttttcccagattattacatgtcacgtgtccctttttttttgactttttgactttttgttgatttgattgatacaaccgcgtctgtccgggacccgagctgcttattatgtcctcattcttatttttgttttcttgtttcctttgttgtctcgcagctcggaaccgggcagaagtgcgcatctctctctgcgtttgttttttttttttttttttctttttttctgttattattctactcatctattcttggatttcttgcgctgctgagcaggctttgattaatggattctgttatccttgcgtgattacttctagacctggacttcaatatgaccatgattttctccaattcgcccgctctccacgttgattgagcttaccacctctagatgtaattgagccctaaactattttctttccatcactaactgcaggctgagcgaagaatgacatgacagctaacttcagcccggacattaatccggggaaacaatttacgtcatctcgacgaatagttgggctgtactacttcttcgagcttcctcaagataagttacttttataccatacaaggccgcagtgtattttatccagcaatcaaactaacaccaagatagctggaaaggtaggatggaacttcttttaattaacatccaacacattgacatggtgaagctgattctttccaacagggcaacatgtctaacacggacggtgagtggctgtctcgtggatttccttagatatgcagaaccctattcacacataatagaagcctcggaaccattcacaaccaagaccaataccacagatagggtcaccggccgcgtccatgagtctgccagtcatgcacgcgagaagatagctgaacagctccaacccggtgcgtatttcgagcggcgatagcgcgctggctttgttgttttacgggtacggcgaatgacgtcggatctggagtcgctctacgtgttctttcttgatgccggctagattactgattgagttctgcaggagatacgaaggcgacgtctcgtcgctcttcagatacacccgataatatctggcaatttggacagggtggtccgagagaagagcgagattatgggctagagaggaacaagtctatactgcagtccgcgcaggagacggtggccaaggcccttggaggagggtctcgtggttagttgctggtgatggcatttgatattttggtcttgctgatgaaattcccaaggtgcaagctaaatgcctctagcaattccttcattccttctcctatcctttgatttcaagaaattattcatcaagcttaggtgattgcccgctattcatcatactaagagtaaactgctttcagccgtgccaactttcctggcaaatatgcgtattgacttttatggcgggtttggattagtagttagatatacttggaaatttcaatatcctctctctttaattggctcccagcctttgtcctctctatccagttttcaacaccagtaacagcaccaaaaagtgagttcttctgctccaataagaacgacaaaacttcagctagactgaaaaattggtctggcaccatggaagcaaagttgtcggcaagctgggaatgcactctcttgtctgcgcggccaggccgaatgagtgcttcatccagatgctcgatatgattggtcgtcataacgagcacctgaccttcttgagacgacacaccgtcaagaacattctagcacaagtcaacagagccgataaatatggaagttatccagaagaatgaagcattcagaaggattgatggcaaaatgaaatttctaatgtccaagtttttgttcggcaagatggcatattatattccggaaaatggacgaatcgattaaattcgccaaagacgttagacgatctctaggaaatcaagcaactgcaagttagtacccgaattcgtccacgggctatgggtagaaagcccgattatatatcgagttgagagctagatgcccgatttcccggaacattgcccaggtgtacggcaggttttcccgttcgggaaaattcatgcctcaggcaataactgatatgataagtcacgtgtgataatcagagcaaaaaaagatcacctacagccatccatcttcaatcaattgacattgcgcagccatgggtgccagctctaaaagaaagaaggataagcaaaaggactttcaggttaggattgtgaatctccgtttctcttgttcaacctactaacttctgcagaaacctaaactgaaggttggaaaaactaaagcgaagcccgacaactacactgataccagtttcaaatcgaagggtatgtgtatctttttggctgcttagtatgtggttatgctcacgattactagctattgtcctcacgcaacaatctctccaccttgctgccccaactgcaaatgccgtattcacgcataacttatctctcctcaacgccaagtccgacagccaacgacgggagtcgctcgcttatctgactacgacgatatcatctcggccagtaaactcgcctctcccacaaccagtcagcgttattctaccatctctgctgccgctcatcctcgatggaagcaccagtgtacggactcagctcctcaagctcttgcggactctcccgccgggcgatgtcgaagaccatgtggcgcaactccttccctacgttcgtgcaggaatgacccatcttgcagcggacatccgtagttctgctgtggagatactatcatggatggtcgaggcagcgggagaatcaacagtttcctgcgcgggaggatggatcaaaacactcaactgcttcttgtctgtgttgggctggcacaccgaagagtcatcgcagtggtcttcaagccgggcttcatttgggaagtctggcagccagggcaagcccatggtcaaaacgcttgggactctggcaaagttcttagatgcggggatcggaaacccttctatcagcggtgtcgatagtgagatgtcgggtgatgatgagagtcccgactggccgtttccactttgtcagaccgcccaacacatgatctcagactcatctaccccattcgcttatctgaatctgtttgggaagccgcgtgatgaggaaggagaaatgtacgaaacccgtgaggataggtatcgcgttttctcgactcgtttccagtcagcaatcgagcgtggaatcaagagcgccagagaggaaggcggcgaattgggccgtgcatcatccggtgtgactaaggtgttaaaagaagcgattgcgtacggacccggcccatgaatttttcagccaaggtttacgagcaaaaccaaatccatccgatataatggtaccgtgacctaggctgggcctagagctttttgcgggctttacctataagccaccagtggaacacgcatccagttcaagatttctcggatatcatactatggtgtctgttttaggcagatggcctcgccctgcgaaaaccgagaccggcgctgaatagacccatcggtaagcccttcggccaggggcccttgcagcaggtaaaagcaagatatatacaataccaaggctccaagccaaagccttaactggaacctcatatatcttctcacggaacattgactttagtcattcatccccatagccttggagagcgagaaaatcacaagcaaaataatctaatatcatctatagaaaattcgattgttagaaagagaaaaccgtatttttatttcttcgtaaacgatcagaaggcaaacgacaaaagtgcggagtcctattattagataggctctgaaatgctgtatattgtacatgtacatgtactccgcacggagtatagaatatgtataccatttccaagtcaattcccgatcgatgcccaaggactaaaactatcctgtttgctgtgatgtgtgtgttagactctgtctcttattcgcttatactggtttctttacggtcttggaagtggatatcctttaacatattattggagacaaagaggggaagacttgacatgtcttgtagcgtgggtctggcacttctgcatttttatttttatttttttgtttttgtttttgtttttgttttgggaattcaggaccacgaaattgagtactacagatgtgaagaagagcgttttttcggagattaagtgcaggaaatggttatggtgtacaaagtactccgtactatctacaatatgtaggtaatgtgtgagacgtcaaggcaaggggttcacttcatgattcattcttccagaatcttatttcttttcgttgaatgggtctcacatccaagtttctcattctcacttataatgccggtatagattaatagttatgtagtacggagtagtgttcccacattgctacatattattgacatatcgacatattgtatattgtatattattattcaatctttgaagtcattcgcattgatcaatatgttatgttattgaccccctatgtattttcaatagtctaagaattgagtgtgagctatctcaccctctctcatttccccgatttacatgtacttccccccccccaaaagatcggccatgatcgactgtctataccctcggatctgcacaggtccgatctaaattcttgctttactcgggaagatcatgctaagtgcttggcttgaaaggtttgttctgttggatctgatacctcacatccggcggggagcccgggttacggagtacaggccggcctgacgttttcttttctcaccccccttgcattctctaaggggggcaggaaggagaaaagccaattagtgaagagccgttcgattgacgattggtctatggttggccagcattgtccttgccacaataaacacaatgaggaaaagggaccgaatccccgacggcaacatgcagctgcattggcacgcccgagtctgccatacaagcgttgtgtcatattacctgctggatcccaaactatacatcgcgagtgccacagcatgtttgatggctagagttgcctagtctgaaaagttctccacaggaccttgctcggacgaatccctttggaaaaactcattttcatcatctcttcggattcgtactaccgttttagcctcaaccaccctgtatatctgcgcctttccaggttccgggaggggcttcctgggactactcctgtgttcgttttagttcaaggatcccctccaagtaaggatgcgacagctcacctgagatcctattaaactctctccatttccgcctcgcagtcccaagttttgttcgctcgttctgattctcccatacagaacgccacgctcgccaactcttgtcgactttgtacatatcgacaccccctgtatatagtggtgtcaacttgtgtcgacgtatcatattcatattcctcgcgcgtctatatagcccctggcccctattgtgttggccctcttgagcaggtgagaatgcctcgctcccgagccagtgcctcggtttatccttctaacttagaagtatagcactgtctattgctttaaccggtaagccctgggttttcatgtcgacacccgggaactgccggattgcaaagcaagccagtaattgatgcttcgtctccctatgcatcagtttgattcaccgcatgactgtgccgttgcaccaagcccaatcgttcggacttatcgacctgatcccccctcgaaacgcaggatccccaacatgacgtccacaaagactgggccagcacctaagcctctagtcattcctaggcctcaaggtggtagtgctccacgacctgaagcccgatcagcaggcacggctgaaagagccggtagaaatgaaagcctagtggacatggttcgattcttccaggctcaaaatataccctcccagcccccggctccatcccaacctcaaccccgctctcgcgctccttctgaacctcaaccctccagtccttccgatacaaccactgcactcccggttcctgtttcgcctaaagaatcaaagccagagtcaaagctagatccaaagcaggacctgaaaccatttcatcgtcgccttttgcagtttgcccagcgccaaaagaaggaatcatcacccaggtcaaagcaagaagaacaagagcgtcaaatcgaagcactgagaagggaaggatatcttatgccagcggctttaccaaaggagtcaaagggacaaaaggaagcaaagcgatcaaaagaaagcctgtcgctatctatctctcgatctctttccaaatcaaagaaggacgtggagaacattggacagccatggctgcaagccaaagtcgatggcaacaggcgccctactgaaaccagacgtagcttgggctctctggatcttgatgatttcggctcaatggtcgatgtcgcagtctcactcgcttccgatttcgacgattccatgccgccgccatatcagcccaccgatcacccttcctcccaatcctcatcggctactccaatgtcaagttctacagcagaccctggtcctcacaatatcatccggccagcttcttcgttagcctctaccagtcattccaataggaacgcgtcaattgatgagcaaatccaacggtcatctagctctgcagagttgagtatccgtgccgaccctgtctcacgaggcacgatcaatacatccgtgggtgtgaatgtgaccgagccacagcctaaaccgtccattgatagccaaaagcgaactcaatcagaacaatcttctgttcgaaatgtaacacccctgtcgcctaccctgaagctttttcccgatattgcacctcgcaagtctagcaggggcgcatggagaaattcatcaattcctcggtaccaaacgatcgaaaataccacagcatccagctcacgaactccatcttctgacagcgcccccgatgttccagacgagcgaaaaaagtcttcagatggttttatagatgctccagtcagcgaggcagaactaaagtgctctggtgcccttgtaccttatgcgacctcttctgcagcggcactatctatagaaaaagccccaaaggattctgcctcccaagatgagactaaaactcggccactctcgttgtctctgggcacactgaaggcatttcctctcccggcacctacaaagcccctgccattactgcccaaaaccaaatgctctccaagcactccggactccaacactcgctcgaaagcttcaaatattcgagcgattgagtcgcagccactgtctaccaatttgtattctccttcggcaacactaatcgaagaccaggagctcaaatccgctattgatagtccatgtgcccttgactcggaccctacaaactctcttggcagcgtcgatgccggggagtcaatggccgatgatgaggacagcttgtttaccacttcgctttcggaacactaccagccaaccccggaacattgcattccgagaggacgtgtttcaagtgtgcgcatccctaggatgcaagaacttcccgaaagtccctcgagtgaatgtggtgcaaaggtctcagaaggacagcctctggccgactctcctgtcctaggacacccaacccctacaaaatctaatggcaaacgtgctgttttgaaggggcttcatgtcaattcccaagccagtcgaaaaaatcttccattcggtctaccatcaccgccacccacttcatcactcccatcagctccacctactcagcacccacctcctccgccttctgagcaaaaggttgaccaacgcaactacactgcgcctaatgtggctgttctgccgtcaatgaggaagatggaggtgcatccttcatcggggccctaccgaggctcgaccttatcccggagcgacagctcagggagtagccttcgacatgagaggttccccgaaacatatcaacaaagtcgccccgaatctcgcaccgaatccccgcttccatcatcagacgatgaggtttttggtccagggatagacggcaaatgctcgcgccggaaagccgacaaataccaacgcatccaaccaacacgccgaggatatgagacaatggatccacgacagatgtcctcacgcagtcgccttcgtgactccaatcctgcgcgccctatgacaccccaaagccgcagcacccatggtcttgggaagacttcgtctcctcagtcacaatattcgcaatcaacccacagatcgagggagtctcaaagcagtcaccacacccgcgctgctcctcaagtggatcactacctcgaggaccgggttgcgaatctggaacgccagaaccatattttacaggccgctcttatggcggcgctcaacgctggagtcaagaaccctctcgagggtctcaatctagacgcgcacatgtcatcaggctccgcacacgcacaccaatatcccggccgccatacatcacggcctgacagctgggtcagttcttcccgcagcagtgagtacagcgggtttgagacttctagctcctaccgagatggccggccaaacgtcaaacagctggacaacatgatcgaagacatcgagtctggctggctgtcggacaagtctagtctcagtggagctcgaattgcccgcaaacgatagataatgatctctttttttgctttccttatatttcttttttacatctttactgcttctgacaccacggtgtcgctcatttattggcttgtgatgatctttttggcttccacttctatatatccaggccctctctatctttgcctatatttttcatgataccattttgttttgctattgatctttttgcattcctattattactgaatgacctatatacttaggccgagttgacatagtacaccgtataaaacgcgcacagaattgaaactacctagaaggtcttgaataatagaggagctattaagtcaaatcctgtcgttttatcagtacccaaagagcttagaggtctttaccggaggattcgatctattcattggatgttttgtgcccatcctaatgcttagtcatttgttttggagaccaagtaactaactaactaacttcttgaactccaagtgcttcaatcattctggccgaagaaaagcacgtggcgaaaacagcaattgcaaagatatgaggtgctcagtgctcgtctaactcacccccgaccataaccctcacaccgtataccaacactcttcacattcccccgcggaaccccccaaacatggcgaactcaggacaagtaaatgcaacctctcctccaaatggacccaaatattctaacaagcctccaaagcgcacacagcaggtcccccagcatgtttccgcgctgctctcgcacctcacctcgcgccccggcgtgcaatccaccttgattctctcccgaaaagacggatccatcatccaaagcacaggacagttagcacaaatgaccgaagagaacggaggttctcgaaccgcacacatcccctcagccacaaccgatccgactgccctctccgccgctcaacccacagaaccatcccctacctcacccgccgtgtcacagccctaccaaccctcacaagccgagacactagctgcccacatcttcgcgtttgtctccagtgccgaggcactcggtgtgtcactatcgcggcccactcccactgtgcagcgacccagcgacagccattgggatgataactacgactacgggaacgaggcgggcacagcacgcgaggaagaccgggacggcgatgatctcgatcgggatgaggatggagaagtgaagctgctgagaatgcgcacgaagaaacatgagattgtggtcgtgccggatcggaagtacctgctgtgtgtggtacatgatgcctcccccggcggaggacctggggcatcgggctcgcgctcccggtagtggaagtcttgttctttattgcgaatatggctgctcgagtcttccggtttctctttctcgttgtgtttttatgggtcttgtttggtggctttggatttcatacatatacccgatggagacaaaatcttcgcatttaattcaagttttccataccatggctatgtgtaggactgctatacacgggttgtcaagatggaggtgtctattgataaggaacactttgttctattgcttgatggagggatgatatacggcgggcaatgtgggtagatgtttgagcaacctccgttagctccactgtttacccctcccaagctgacaatgatcaatggacagacatccttcgtatcttgcaattcccacgcctaatagtgcatatatcacctagctataacaatcgagtctgacctctgctctcgatatttcagcagctcgctctggcttccctacactgcaataacaacgctgatgagatggccctccgttcttataaacgagacttttgctgattgttaaacgacaggcggaaatcaggttctcgatactctcgttaatctgatcgacactattgtagattttaatctactaacgtggccatagcatccattcttacctgctaagcacaaatgtctggctcagagtcagctataatgtctcccagacttcgactgatacgtacgaaaatgcatgcaaagtagctgctgagctcactaacgccgcgcctgaggaggtatctgcactataatcaatagcgtttacttcccaagaagtataagaactgcccaacttcgggggtgaatgtatggaatcagatcagcattggtatatcaaccactcagctattgtgcaatctctccacggcgattaaattccaatctggcaatgaactagtcctatacaaacttaacaacaaagccaatacctccccgtgggtccatatagcagagaggttgggcttgaccgtaaagtggtgggcgccgaccaaagaattcaatgtgcgatccagctgagtgagggtccctgctctccgataagaccagactcgcggcatgccttcatgcttccaatatcactggcactatcagtaccatccgaaagatcgcagaggttgctcatgttcatcccgcgtgagtgaccataaaacatattgggttctaagcactgatgtgtgtggatggagtggccctggcgccgcatcgtcgggtcgacgtgaaggcgttgagcgtgggtttctacgtaaattgcaacccaagccttgggtgaccggttcattgctgatcctccccccacaaggcattatcctggtacaaggtgtatggaccacactggcgcaactatatacctcatcacgcgttcacgaccagatctagtcactggggcatttcttcaagcccgcatataccctaggcatgaagctgaatctcatatcggctaattatgagcttacacagagtatcccccaggttgtggagtacttttgactccgaccctagcacgacctgggccccgatggccaagcacgaggagcgcaacagattatactggaattcctagcttctaatagccggattcccgttatcggtgaaccttcagccagcaaggagctccgtatgccggttgttagtttcgttgtgcagggagtggacagtccgcgccccgtggatgaagttgagcgtcgatcggccttttggttccgcaatggtcatatgtacagctacagctacagccaccggctactggccgacgtgtgcagattggacaatgtaaaggacggggtggtgccggtcagcatcctgcactataacaccggtgagtggatatcttgataggatttattcgatattaacgaggatagaggccgaagtatgggggctggtgtgttgcgggaggtgcttgttctatactacttgtagatagcttactccgtacatgcgatgtacatcatacctgagctttccggatacattttacatgctatggagatttttcttcgaatttgcctttttttctcccacatcactacagaccgcatattttgccacttagctgccctgtagtggtgatctctatattgtagatagttaaaccttcgagaaacccacacaccttgaagcctaaccgtgaaatatctgctctttgttttcagcctaagttcccaccgtgaggtcatctgagttccaactcccgaggttccccagctccatctggaaggctgcaggcaaccccaaccaatgccgatcgcagtgtcagccaatcagcatagagataatcgtggaataatgggaattatagtggatcacagcctaacagccgcgcgtggattggcccaagtgcgaagacagcgtggcaagcggcttttatgactcagtggaacttcgacagagccttcagaatggatggattccagctgtggttgagtattatgatgaacatctcatgaaccttccccttgatttgttaatatggggtcttttttttcttaaaataagatccatcacgctatgagtggctacacagacataaggtgccactgtatagtcaaaacattccaggtactctgtcatgtttagaatatcaagattagcatgataatagatatagaacatgagatagaagatattagactatctaatagcatataagaagaaaagtgacagcagcgtgagtcaccgtcgtaccactccagggcttctcctgccctcctatctcggagtctcttcgccgcatccgggttttcccccctctcaccatctctagagaatgttcttcatctcctgattcaagggagaatatcatcaagaagtggaatatttgactatattctatattctgtatacagtcgtggtccctgcgcctcccggcatcttcctaacccgccacccacttcttctcgccacagtgtgactctcttttccccttcctttttgcccccccccgaatctttcttagtcaacttaaaaacagattttgagaagagtcataggtaaggtcgttccatagtgaaatgtcttctcttatttctctgactcctctaacaacatcttgccttccatcagcctcacctcccccgactctcgcctcctcctctgcctagccgcttcaacgactgccttgtacagacaagccaccagcgtggttctgcctgtccacggtccgttgggtgccttgatataaacccttttctatcacacgacttgtttcaaaatgtaccttattgattcatccgttccgatcgcctgtgttgctgttaccgacctccgcatcgtcaccgtctccggctccatctaatacactcggacaaaagagtcatactgccacgtgcccctgctttggttcttatatcagaagcacttggttgatcggatcgtgaatacgttttccttttcttgtcttcatagttgattgtttcctctttggcctctttttaaccgctacacccggcggttccgcttatttttctacgtctggttatcagcctggctctctacttttaaaggtctgccgtcgccttcgtcgcaaagacggcttctgtctcctcggctctcgttcccggtttcctgcttaacggtatcttgacactacggttccaaaaaatcggaccatctcgcttttatccggctgtcttcatttgaacttgtgttcacacaaacgcgctatatgaactccacagtactttcggatatgtcagggatggacgtcttggggttgaacctctcaaacccaagctctcaattgacagcgtctcaccacgctcacccctatgcctcatcgatctcttcctccgcttcctcctcctcctcctctgtattctccctcgattgcgtttcctcgcagagttcgatatcatcgacatctaccaacccggttgacgtgatttgggagaatgagagtaatagccagttggcgggaagaaatccgaacggggcatgcccccgggcttttgccaaggggcctgcttctaaggtggacggtgtagtgccatccgagctgcgaacgcaccctcggcgcactaacagttattcttctagcgctcccagtgcgcgccctccgccatgtctgttacggcagtcggaacggaaggtgaacttcgtcgacaacctcgtcggtaagtcttgaaaaagagaatcctcaagtacgtcctcgtacacccggctaaataatattcccgcttctttaagacaccgcgtcacagatcgttgagaccatctggcccctttctgccgcggcatcccgcagtgacgccgcgaccggatccaaaggggttcttcccctccgcacttttatccaggaaactctccgccgctcgcgtactagctacagtaccttgcaggtggccttgtactatttgatcaaaataaagcctcacgtgcccacgcatgacttcaccaaggagcagcctcgggatcagtcgcctttgcgggcgatgcagtgtggacgacggatgttcctggcagcgctgattctcgcttcgaagtatttgcaggatcgcaactactccgctcgtgcctggagcaagatttctggactcaacactctcgagattaaccagaacgagcttatgttcctcaaggctgtcggatggcgcctacacatcgatgaagcaatgtttcagcgctggactgatttggtcttgaagctgacccctggtgccggtggacccccggttgctaaaggtcagtgctggcagactgtcctacccagactcacacctgaactggactatgtagagtcagagccattgagcccggttgcggcgattagtgggatggatcttggtctgtcggaatactcacctcgcagtctgccaatcaatgaatccgtgcgctctttgtcgcgcgaacaaaccccgacttacgcccggagtcttccgcgaacattggagcccactccgcgcatggattttgccaacttggctttgcctagtattccccggcctatgatgcttcctacgccacagatgaccccgcaatctcaagtgtcctccactcctgctgcgagtgtgggtgcttataatgcccgcccatccatttgtacggctatgtctcaggcgcagaatgcgtgcatggcgcgatcaacactcgatcagcgcccgcccctgtcattctgccctcggactcaatcgtacgatggctatccggctgcggctcgtcggtcgtctttggctcgctcgacatcttcggtctcatcacctgactcgatggtttcggacgtctctaccctgtcatcccgctcttcgcggtcgtcatcagtttcgtccaatgcctccggtgcttctggctcggcgccacctcgtctggccgtcaaggccacattgcgctgcactagtaattcccttaaggagtcccgcaagactctggccattgcctctcctattgacgagagttgtttggttggcgtctacagctctcctggatatcccagttccatgggttcttccgtcccagacctgtctactttttccctggattccagcctgagtgaagctgctcagagtctctgcgagctttccggcgccacacccgaacggcgtcagtgccgaaaacgcggacgtactggatccgacgatctcttgcttcagaaccatgtgcgccacctaatcaatctcggtgtatctggagaccactgcgggttgcctgacggacagttcccatgttcgttcatgacacaacatgggtcttccgctgtccccgcgcagataggcccagtctctggaccagcaggcatgaaacgtgcctgctgtggtagcgaagcacgcaagatcgcgttgaacccgagtctccgtgttgcggagtacctgaattgacttgcgatttattagcggatttccttttttttcttatttcctttgtgcgaggcaaaaaaagaaaaagtccgtcgttttgtttttgtttttttccccctacgacgacctgaccccgttgtacatacccctattctcgggtactcggtcgtacgtactgggacttgggcgtttgattcccacgaagtgtaggatgtggtgatgactggcgtgtcttctacttgcatcgtgcatctgctctttcactttttcccctttcttttatctacttttgcggttgcgaacggagtggtcggcatgggacggttatggtctttatttaccctggttactttgggaggaagcgggcgtctgccctggttacacctgtatcaacttatctatctaaggggtggtatatttgccatcccagagggcgagaactcctcggataggatagtcaatccaaatacagctcaacagcgataccggcccctctcgtatcactaagctccctggcaaccttagaactgcccagatgtgcacatgacagtctgactgtgcaacctcggaacggcctcggggaattccatggttttattgtgagtcatcaaggcgtcaatggacctgtgtggggctgtgaaccttgggtgtggctgtggggtattcccggagggggatattagccggtctcgatgttgtacatggaagtatctagtggagctcatgcatgccacatattgttcacagctcggctcttacaaggagttatgtacttttatttcgatcctggggtgcttgagcatatgcagacaaaaatcccatgtctatccgcaactgattataatagggcgggactaacaaggtctcctgagaaacgagtgcaaatgcttagaagtctggtgtgacaatccttggcttctatcgggtggactcgctgtttacgatggcgagaaaagaaacccatctctccgtatgacatacatactacggagtagttgacgctaacagaaaattaaggatatcgatgccagagcctatctagatgtggaaacatgtatactagtagataaactttgtatcctatattatcttaaaccgcttgttattcttcacgagattgggcatcgaaatggatctaacgaggaagatatggagtctgatttcgggaagaggacatgaatcttggccccgaaggcaaagactatgacgaacaatgggggttagataccttcaatttcgtaaagccagagtgacgacctatcaacgcggttaatcaatcctcaccgcactctgaggatggagttaagcagatgaacttgttgaagttggagagcttactagatagttagtacactacctaaatacatgtagttgctgggctctcttgagttgcgactggatgacagaagctttgtacggcaatttcgtaactagttgatattgatagctaatcatccaccgatgtcgtattaggcaaaaatagccagctataccttggcctggagactattgaagagaaaaatccgaggtggcaccactggcggttagagaatgccgtagcaggtgactcgatcagataagattgctatcagctgatgcccccgcacttacccgtttcgttctgctctcttcttccttgcacccttgaatatataagagctcctttgatgccaacttgtctatctcattagccgtcataatggtctctcatttggcctccatcctcactggcgctcttgcgctgcttttacccctcacggctcacggctttgttgtcccacttccagacaatctccaagcctttctcggacgactagatacttcgacacccagcccgaacattaaccatattgaagatgaaagtgccttgaatcgaccgtcatggttcacttcgactttgatggctcgtcggctgcttgcgctgtcaccctctggcgtcatctccaccaacttcccagagtccctcccaccctccgcacatgccccatcagatgttgccggtctgtctatcggactacgcgagtacattgccgattgtgatggatccctgccatcggatttctctcacgatgatcgcggtgatccaacaattcttggccttcgcattggaaccacttttaagaacattgcagcgggatctaatctcagtctccagttagactggtgggatcatctaaatgaggccggtccagtctaccctggtcttcctctaagcccggctgctcttccccgtgtcaccctcttcggttacttggagaaccttccatccccgcttcccgatgacgcagctgcggccctcgagaagtgtttcctcgagcctcatcccgatgcgaaggtctggctacctggtgcttcttattcgccacatgcgagtttctgggcccggttggtggtcacccatgcttactggattggtggatttggcgatgtacagcagattgggtggatcaacctcacggagtggcaaggggtccgaccacacggcagtgtagagggcgttggtgatggaagagggtggcaggatgtccggttgccgggtgagaaacagtaaatggagtacctaggtacttgcatgaagattgacgaatgactggggcgcgcagtgacgatcgcattagttctttcgcattagacctgcgcatgcatcatggatcgcaattaagcgtatctctatatctctccacgctaaccagttttacgaggtacttttgagttctctcttctcattcgtcccctagtcttatctacataccgtaggcttatcattcttatcttcatccctgttgtgcacggggcaagtcgggggcaaatctggggaataagaagacgttgagacctgcatcatttttggtctcattgtattacttctatatcattgagctgtttgtcgccttgtgttgtggtgttaggttaattaatatacggatcggggcccgaaccctccttatcttgagaacaaccatctcgccaattgcatcttcgaacatgaaactacgcatctccaggccccatttacgggtctcgcagggtgaatctgcatttgcagcgggaaatgcacggtggacaaaccgtgatctcgacccgattaccagaattggacgcaaatggggtatcctcagtataataggtacggtactcgtgcttatcttttacaaccatcaggctggggctaatagaatatgatatcagcatattgggtctccgatgccttgcatgcagcaacctggcagttcgccagcggtatgattgccgtcggcctcacctaccgtgaagctctgggcatcgtcgccctgtccttcttcatcatgtcgttggtcatcgcagcgaacggtactgtgggcgctatataccatgtcccattccctgtgattgctcgtgctagttggggcttttggggctcatatatcgccattatttcacgagtcatccttgctctcttctggtttgctatccaaaatgtcaacggcggaaatgccgtcagtgtcatgattggagcaatttggccaagcttcttgaatcttccaaatgatattcccgagtcacaaggaatcacgaccggcggtatggtcgggtttgtgatcttctggttgatccagattcccttcctctgcatgcatccaaacaagctgcgctggttatttacaatcaaatctattctggttcccatcgcctggattgctatcttgatatgggcgtttgtcaccgtaaaaggtggtggtgccgtatttgaaaagcaggctccaaccgtctccggctccaagtatagctggctgttcttggccaatatgacctcagtcttgggaaactacgcaacactctccgttaacatggtatggatgctgtcttactaccaactttcacaaaagctaaccgttcccagtctgacttcacccgctactcccgcgtcagtccccgctggcagctgctctatatccctatgctgcctgttatattcactttcttttcctttattggcatcgcttcttcatccgctggccaagttcactataatctctcgtctatcccatgggatccaacagtcctgatcagctattggcccaatcgcgcgtgtcgatttttcggcgcagcgtccttcgcactagcctccctaggagtgaacatctcggccaattctctttcggccgctaacgatttcaccgcactagcaccgcgatatatcaacattcggcgcggtcagcttctttgcgccttgctgtcgtggtgtcttgttccctggaaaattctcgaatcggcaggcaacttccttgattttatgtctgcatatgcgatattccttggtcctattgcttcaatcatgatgtttgactactgggttgtcaaccgccgtcgatatgactgtcttgctctataccaaccccataacccaagatatcgctatgagttctccatcccgggcttctcgggtaagagtatatctggtacaaactggcgtgccgtggtgtcttttattgtgggtgttgcgccatgtcttcccggactgatcaacaccgtgaactctcatattgatgtcggcgtcggtatacatccgttcgagtttgggtggctcttgggctttgttgcgacatctattacctatgtgtctttatcatggctgtttcctgcgcgagagactcagatcgaccgtgctgttttacctgacgagatatacgatagaggcacggtgttcgaaggaatggaagcagatgacccagataggaagtatgtggttcctgatacacaggagaaacacatggatgtggtttaggctgtctggggtttctctgataatcatgtgaattttatattctgtaccaagtggcatgtagatatctttgtgaatataatcaacttcaagaatatgccgaccgcttacctttgtccttaataaagtaggatacttgagcaggataaccattcatttggcccaagatgatataaccactatgttttaatttgatgacactatgcatatgttcccagagtgacagccatttttatagcatcttttcaggttctaaatccggcccttttcccttgctgcaattactaatacagcggcgaatgacacgaacccccattttgcttgacccgatctaggtcgagagggttgcatcgccattttagagattagtccaatacaccatgtcggcctattgaattggggaatggaaaagccaacaagctttccaatccgatggtttccttctcaaatgctataacaccaagatacatgtagagaaatggcattgaaaaaacaccagtccttcggcaatctgtcgtcaattccttggcaatctccagttgaccttccaaggtttattctgccttccggtatcttgtccactctcatgtgatatcacacatcttttaagtggtaatgcccctccagactagcaggtggcagacacgttgctacggtggttcggagcatcttatatcctgtatctagatggaggtaactaggtagatcatatcgtccttgaagataaaggtcataagcggccgataatgtatgccttggaaatattaggatctgaatgtattttcgtagatgccaaagaggtatctacctggccatataccaacgcccccccccccnnnnnnnnnnnnnnnnnnnnnnnnnnnnnnnnnnnnnnnnnnnnnnnnnnnnnnnnnnnnnnnnnnnnnnnnnnnnnnnnnnnnnnnnnnnnnnnnnnnnnnnnnnnnnnnnnnnnnnnnnnnnnnnnnnnnnnnnnnnnnnnnnnnnnnnnnnnnnnnnnnnnnnnnnnnnnnnnnnnnnnnnnnnnnnnnnnnnnnnnnnnnnnnnnnnnnnnnnnnnnnnnnnnnnnnnnnnnnnnnnnnnnnnnnnnnnnnnncccccccccccccccccccggaagcatttgataacatggtgaagtggtgagaaggcccgaatgtgggtaacgttggaaagacgcaggaagatacaaatcaagacgatattcatcattgatattagagtattggttgaactaggtgacaggcatatgacatagcgtcatgcggatgctcacaggtacatcgggattggccttgcggcgcttacttgcgttttggcttgggccggatgaaagggtctgtcgccttctttttgcgcattattggaggtcggggcttgggagcagcttggttgggaacctatattgataagaaatcggtgtcagtaatcaataacaaagtcagacaagaacatgacgcttacatctgctccagatcgcattggtggagcccttgtcgggtcattttcggtcggatacgcctggccatcgcgagaaggcttgatgagaccctaaggagttgtcagcatgtatgaaagctagttgttgaaatagcgagaaaaacttactcctggtgagccattggctagcgggcccttgtaaccattttgagtattggccactaggttgtcgcgagggggaccagaaagacccgggtgaccactgactcttgggatattcgaaccacgggcagccgggccagatagaccgggatgattactacccaatgaaccctttgaaacatggattgggggatgtggctgcccggtacgaggacgttgcgcttgtggtccattagaggaagattcttcacgttttctcttcgcagaattatcaagagtgttgattggcgcggttgaatttgtggctcgaacaacaggaattttggggttgtgtcctcctagttgacgttctcgctgacgctcggtcgatgaatcttgacgttgcttgaggatatattcgtccctctccaggcgagatttctcgatctttgaaagaactttcgtggacgtgcagttgcgggatgagtgcccacattcaccgcattcaacgcatcgttcggcacggcaggaaatcttagtgtggccaggctgaccgcagcggaaacaggttcctcgagcatttgcctttgcttcgtcattgtcgcagttgtaagtaaaatggttggcgcttccacagatcccacacattttcgtcgggtctaagcccttggctcccccagaaggtccatcgggttgtggaattggggatgtaccgtggccagaggcagacactgagacggaggccgacgaaggtcgggaaattggcggtacagggggctcatagtcgggagagcctggagcttctgctgtgtcaaggtcgaccatttcaatctctttgtagccagtgaattgcggcttctccaggattttcacaatatcaccctccgtgtagacatttcgctcccgcgcgttctgaatgagccgactccagaactgaccctgttctagggactgcgagttacccagaacccagagcgatgacttggcacgggtgagaccgacgttcatacggcggatatcagccaagaaaccaatacccttgttggatgctcgcacacaggagaagataatgatttcactttctctaccttggaaagcgtcagtcgtattgaaatcgaccttcttcaaaatgtcttcgccgtatcgttgggtaaattggttcttgagctctcttagttggcccttataaggtgtgatgatgccaatcttgcccgcaaagtcgtattctttgacatctgtgatcaaacgatcatacagttgcatggccacttgtaactccgcgtaattgatcaaggaatgacccctggccgcagatgagtgcatgccctggacatcaaaaaatcggtaaggactgagaagctcgctttgatgccagggacgctggcgaagcttggccatgtccggtccatcctgcaacttgccatcatagaacgtcacactggggaaatgactgatggctgggtgcatacggtactggatatccagcaaatgcacgtctcgagggtgattcttctgcatgcggacgaacaagctctgttcatactggaacttggacgccatttttgacagtacagttggaggcaactgtttgggatcaccgacaagaacacacttcgagcagccgtacttcagcgggataagagcactgagttcaatacactgcgccgcctcatcgatgatgacggtctcaaactcgacattcataccctggaaaatttcatgtccagatccactgagagtagtgcaaatgacatgagcttcgttgatgatttgttcttggatccgccgtttatgcatatcagcattgcgggccagcgtatggttctggtcacgggccttatcaatagacgtgcttaattgggaccgtttctttttcatcaagtgaaattcgcgctccagctcttccggaggaggtaatccctttgctcgtgcctcatcgaggcggccacgaagctctttgaatgacgtatcagtcgtcttatgctcttcatagagcttctgcaagtcgacaccatttcctttgctaggatcctgattcagacgggcattgaccatctcatcaagggtaacatctaacacattggtgttgattgcgtcacttcttcctaaacgaagaacagagaccttttcttgccgaccatgagtcgtcctcacaccatccttcaatcgcatgactaactcgtcgacggcggcattgctaggcgcgcaaaggagaagtttctttgagagggagtttctcgcaacaggggcaccgttgactttgatcacctgtttcccaagcacgtcgcttagaagacttccgacaagcgcgatgattgttttggtttttcccgaaccaggaggaccttggatgagagtaaaagcgtcgttgtcgacagctgacttgatggcttttgcctgagcacgattgatggagtaattatccatgatgggttgcagtcttgcgtccgaataagtgagaagaggtgaaggcttagccaagacaatctcttcacacagatcatagtactgcaacgccattagggcaccatattcacgctccactgggatcaaagaagtgatcttggcaccccatgcctcggttcccggccctaaagaagacaggaacttgttactcccaggattgacccgatatgtgacctccatctttttgttctttcgattgacaccgcatacacgagcgagaacatggggcgcactcgggtcgcttgtgagtttgggcgagctggagaacatgaccaaatcaccttcgcccatgctaaaatccttgggaagaacaccaagcggctgggtgctgaattcgatccacgagtcgacagccaatcgggtcatgactttgacttcgaagggtcggaaagaaccttcgtccttcgcctgttgaaaaccttgccacgcttcaagaattaacaaaggttcgaatgtactctggtaggcatcgggtgtgcggaacgtgtttgagaccagggaataatcagtgcgatccgaggaaggaggaagatcgccggttgcgaaaaagtcccaggagaggattgaacggtgaagagaactcagatctggagccaggcgagcccgcatgtccctgacagaccgatggcgcttgacctttctgatgggttgctgttgaagggattgttttttgctcaattcgtaggccgcgacggcgtcgggtttcttcggtttggcaccaaagagttccttgtctaattcatcttcgctctcagaatcagactcgtcaccagaggaaaccatcatgctatctgcaggggttgtatgatctttacccttgataccaatacctttcaggccagagccttgttcagctgtttgctccccaacaccatatgcggtcgtgttcttcttgagtctggcgagctcaatctgatcacgcttcttcttggcctccctttcccgttcgcgcttctcacggaaagataggacgtgggtggggtcattgttagatcgtagaggaggaactgacttgggaaacatcctcggagggaaaatgtccggacgattcttgagagccgttgaggagtgcattttggtggccttttcagctgcgcgtttggcttgggttgcgaggcgagccttgttgaattcgacagaagaagacagctcaagaagagtttggtcgttcaaagtatcatcatcaaagtcatcgtcactggtgatgcgagaggaggggctggaagcagagggtttggcaaaagcggtgatcgaagactgtttcttgagagcagcagttgaggcagtgacgacaggtttcttatagtaagcctccaatgagcggactaattctgccttctcacgttggttgagtattgttttgattgtgccattgacagccaccccctcaataaagctcaatgcatctggcttcacagtggtcacattcatcccacccaatctgcgtagaagttttgccaccaaccctacgagcgtcgttgccaagaactcatccttcaacctaagccattttaccatagcactcattgtggctgttggggacttgaggaaattttcggatgcagaagtctgccccgggtccgcattccctacagctcccaagaacacaccatattgatcaaaaagaaggtcagcgaactgaatcgtgtcacggcaaaattcgagcatgacagccttatcattcccccgaagatgccatgcctcggtctcatcaaagatcgtggtcagtgccagccacagatactcccaaagcttctgcagcgacacaacctcccggcgatcagcgagattacgagttcgcagcataccggtttgactgtcacataatatctctacgatgtctgtaccagtgtatagcattcttggggcgggtgcaaaagtcttcatgtgagatatccgacggaatgaccaactgagtccgtaaattgtggtcgtgaacgaagattggaggaggtgagaaatggcatctcgtcgagctgactggccactgacggccttgatcaagtcaaccgcagctgtataggtgtcatagtcggcggcaaacagagccgaaataacggcgctactagtatcctggctttggaacaacgtttcaaggtgctcgggtggaaagtccgcgagacgctcgatgattcgacatgagaggttggtgagatggccataaatcatattgaagtgggtcttctccttgttcccttctcctttcgtgggaaacatctccaagccaaccaggggcaagattcctaagagggccgaacttgacagcggcaggttatcccggtggaggtgcttgatcacagcatcccagatgggtgcagagtaggtagatactccatgtgagagcgtaccgtgcttcagaagtgcctcatagtcggtcttcaacgattgacactccaatgccaaagtgttgcgtacaacttccatgcactgcgtgagaatgccattctgccgacttcgctcaacatcaaaggtcggggggctgatgattgcgtcgattgtatcaccaaccactcccattgtctctgccaatacgatccgagttactgtaccccgggaagactcattttctgtgaagcggcgtagtgtttgaaggagactggccaaaccaatgtcaaagcagtgatagcgcgacagattgggatattgagtatcttgaagacggccaagtaattgcaatatcaagaaccgacaggcagacggctggtgagcacccttcagtgagccgaggaagggattgatccaggagagcatgtctttcaaagcggatttctcaaagggctcaccctcagaggtttccaggagaaaagcattgaattgtgtgttgtaaaatgcctgttccatgattgcttggggagagatggtttgcatagcatcccagaaatcaaccggggctttctcgaggaatagttggatggtgttgagaaggaatcgcaagctcggcgcaggtatggcgagatgatccacggagagacgacaagggtctatttccaaccctcgaagctgatgtgtaatctgctctttgtccagctttcggacaacaagctgcatacctcgccacaacctctgaatgactgcgaattgaggtggctgctgtgacgcagcccgcaggcccatcagcaagccatcgcgtactgcccaatcaaattcttgattagtaggaggccgcgagtatcttgtccatgactgaacagcccagaagcttcggaattgattagaatcaaaaagaaagcgagagactgcaggaatataatctgaaactttcaagcttcgctttgtttgaatgagtttgaatggctcatcaaaatattcctgcaaaaggctttcgttgcgcagcatggcttcacagctcagggtctcgaagattgacagcaatgcagccctgtccaagacatccaagctaattttctccaatgggatttgtttcaactgggtcgtggcggttgtcaagttacgagtgattctccgaatgtcccactcatcgattctctgggcaaacgcctcaatatcatcttcgtgatagttctcctccttgagcaggtccatgagccagattttgccgatgtaataatgcttgatgcatagatcacatttctccagagattcgtctagttttcccaggatccagttctgatcgtcttccacgccatccttatggtatgccaggatgcgcatggacgagagaaaactctctcttcgagccgttgcttcagctacgatatccttgacggcctttcctgattcgtccacttgctctaaatcttcgtagcgtccatgatcatcgttgtctttccggggacagaagaggtgggtggtctccgggagggccttgagttctctgtacaagacacaatctggttagttccagctcgtttgcttgggaaggttttctggggcctacctaatcgcagccagaaactccatggcaattgtagtctcgaattgtgaggtagttatatcgaaatgacagagttcggtgcatttccttcatcccatgggcagagcagttagaacatcgttttgtcgagaagtaacactgatctaaaagtgattccacgacctttgactcaactgccgatgagataatcaaatgacgtgtcaggaggctcaagtgaaggacaaagtgatgttgatagcagcgaggagtggcctcgcaaccgagtgccgtatttgaccacgatatgctgatacttcggcgatggaaaggcggcggtggatcggcgataatatttaaaacaccttctgcctcaaataatgagactttatgtttagccaaagcaaacgagaaggagaagatagcgaacaaaaatccccagtgcaaatgccggatgccgaagtatcattggcagattatttgggcggtgagattgatttcaacgcgtagacgcgctctattttacccaactaggacactactataatcaagactgcgacgtagcgcaaatttccctcggcagctacacctggaaaacacataacagtgcaggtaggaatcttaaattgccacattaagtaatttccgcgctgggggcattgaatagaatacatgaatgagaaccctatgccggctttgtccttttgatagaggaaagaaacaaaacaaatgaacaagaaccaaacgcaaaaagatcatccaacaagatataacatccagatgggaaccagacaccaggaaaccttcaaacgcgggtgtcatgcactttgcagagacagaaacgcttttgtacaagggataaataccataggccagacaggcttagtgagtgtagggcatgcatcggaaaaaataaaaataaaacattggagacagggtaagagtgagggaggtaaaaacgaagatcgcccccagcatccgactgagtaaacgaccaaaccagaacgcctgctttctatcagggaatataaaaggctctcaaaaataaaataaaacaccacagcatattgctcgtcaaataggaatggcgaggagaaatcacaaggaacgaaccagaagctctgatggggtaaagtcatcagtgacggttcatgaggctcaatgcaacgcaatatgcgctcctctatatcacattatgtacaggaggatcgtcagcagtccggaatgggtcctcatgttgacggtgtggagtttgcgaagattccacccgagaaagcatggcagcggaagtgaagtcgttgctttgctcgaagctcggtcgactccggtcaaacgaatgccgtgtccggtcgggagatcggcgaacatagtccacggactgtggtcgcggatcatggtcaagactggcggtgtagttggtcccattactgctgttttgactgcgggggttgtgggtgtttgcggtcggggccacggatgcagcatagaagggccgctcttcatcagtgtcctgcttgatggcgggctgcactggcttcactatttccgaagaggtagccgattcatcactgggagccacggccttcgggcctccctctttcgggggcattgggggatcttctatggcgtccagatacttgaatttgcccatagtcacttgctcgcggatgatatcgacatcaagcgggaagaacaccttctggatggagttgtacgtgaaacgcggaagcaagcaaaccacgacagtcatcaggaggacgacccagtaactcaacgagccgtaaacttcagcagcggaatggtagaattgaccagaggaagtgaaggaggtataaatgccggtccacacaaagatgagaatgctactgatggcgttgatcagagacgtgaaccaatcccatcggtaagtattcatcataatgtagatattactagcaatcaccgcacaggacgcgactagaactccgatacgggctcggtcattgatattgcgtccagtttcgttgacgaagtttgctggcgcgaataggaggtaaggcatgaagaaacaaataattgactggtacatgccatcggccatgtacaacctgtccaagttagtatgtctcgaaacatctcaagagtttgggggaggattcaaagtaccagaacttaagttgcgaccattccttacgctcgatacctctcatgtacagttgagggacagcaagagacaccttgtcgtccacatcctgatcgaagatacccatgaagattacaggcaatgaagtgaaagcgaggttgaccaagataatgtaggtatagtcgaagaggtaggagcaatcgaagtcgttgtagatacagtaccagaaaagggcgaacgtccacacgagattctgggaggagtcagtggtaatacagaataatagtcaataccaacgccacataccttataaaagaagttggccgtgcactctccgaggcgacggtaagaccatctcccatgcaccaaaagaaggcgctggaggtaccggaactgaccaattgcataatcggatgacatgacagcttgtctaccttcttcgccagcaataccgacaccaacgtcggcctcttgaatcatagccacatcgttggcaccatcaccaacggaaagagccatgatgttcagcccgttcttgaccatgttcacgacggcggctttctgtgcggggctgacacggcagcaaagaacggccttgcactgcttgcagagtaggaggaatttttgctttaagtcatcggagagcatcagcttcagggtttcaccatcaacgaccacggcatgtgtagcctcgggtggtgtatgatcagcacgagcagcaataagttcctcgtcagaaccggtcaatccgaaagtttgcaaattcttgtcgagttcgtcagaggcctgctggtgttcagtctcgggaatgttcagcacaatcagctccatgttgttattgagtaggttgcaagaaaacccaatgttgatggcggtctcaaccttgtcaccggtaagaacccagagtttgataccagcgtccgcaagaagctggattgtatcgggcacaccatcctgaagtctgtcctcaatggcagttccaccaataagcatgagctcctgttcgatttgactagaaaccatctctagtttctcctcacggtctgtgatcgcagcggcagcgatatcgtgttccttagcccatgtgtagtattcatcctcactaagcagtcgatcggcaacgcacaaagttcgaagtccttccctagcgaactcctccaagtgctctgcagtctgtcggcggagctcctgttgtttgccacgggctagacgggagtaaattatactgtccgcacccttgcagaagaggcgtatagtaccatcgggcattcggataattgcactcattcgttttctagatgagttgaattcaagggtgttcaaaactgtatatgtgcgttcctcgcccatgacattcaggagaagatcgtcaccggctcggcccaaaacggtgaatccacaatctcgagcagtgctgaccaacgctgcctcgtcaggagactgggccttaaactcaatttgaggggggtcgccgggagtatgctcggtgataacggtatgacacaaggcaagagccagcatgaagtcctctgtacagtgcttctgccgctctccggattgtcctgtcaaatcggccacaaaattcggagcaacgaacgtcagttggtcgtcgtgcaggtaagggttgtcatgaatcccacgcaacagacccaacattttctgcgcatcggcagcaatttgttgtcgagccactgcggcctctgcgtcagcatcagctccctcgcgacgccgcatgccaacctgagcttctgtgtaagcctctccatatgccaaaccgttgaccgtacacttcttgaactccatcagattttgagtcaatgtaccagttttgtcagaaaaaatgtactcgacttggccaacgtcgtctgaaatgttccaagacttagggacacaatagatccccagtctctcgtagtacatgaacagatcgttgttgatgaaaagcgcttggatggtccgaacaatttcaagagaaatataaagcgaaatgggaaccaagttttggaacaggatgagagcggtccaaaaggtgacaataccagtgacaggtggtgtgcctccgtaggactcaagatcaaagtagtctagagatttgtctggcctggcccatgcgattccattcacaatacctgcgacaatacacatgaggaataggatgaaaaagttgtaaatgacgttccaattcagatcctttgccatgcgaggtcgttttgccggagtcgcaccggaattgagcatgatcttgctctctccaccggtgaagaggacaacacctaggacccattcggtactcttcaaattgcacccacggagcaagatgttgttgatagagatgggctcaaccatctccttccggggagcttcagggaaacgtggatcgcgctggtcccaacgtatggcaccattgtaagtgtacaggttggcatgtggggcctcactttcgatcacaaactcggccttttcgcagtctctggcgtgtcgaacttcatggccacagtgaagagcttggcgaaccttcaaattggtttctccatccaagccttttgtttcgacataacatgcgccatccgggtcagaagtggacagaatcacgacatcggctggaataggatcctcgttgtacaaccggacaaagtcgccaacttgcagacttttccactgctctcgcttgaatcgggccttgccgggtgtctgcttggacatgtccaggatggttccatgtttcttgtccggcgttggctcaacgacgctctgtcgagctgcgctgttcggagacagatacttgttttcagggttgctcacgatcggccaatcttcgcgagcttcgggctgaggcgatggaacatcggtcatggggatagcgatatcttcgggggctaaggagttccgctgcgtataaatcgaggaccggcgatctgctgtactcaagaatgagtcgcgtctttgcccttcatcatcatccccctctttctctttcttcttaaattgagaaacaacccacttatatgaggcgatcgagcccctggtacaagccttcttgacacgacgccatatatcaatgttgtcttctgtcgaattgacattgttccattcaaccagtctgtaaaccggagagttgttcacttgattgtcagacactgttctcccccaatcctcaatggcatctttgatagcggtcacaacgataataacgattagaggaacggcgttcagaccggggttgttggcgccgaaaattggaaagcactagaatatcatcagccaatgccaactggggtggaagccatggaaataagggtatcactgcgtacattaagaatgatgacgaacaagaaatagatgttcgcgatgttgtgaaattgtagccagatgttgtagggaacaaaggtgagcggtgtatacttggccgtgcgaattttgtttctggggtacgtgatgcgcaaatgaccatcctcgtctcgttcggattccggaataggaatgctgaagtagattctccgattcggtccttcttgcgggatctgagattcgctattgcctgaggtgcttgtattgttcgattttcgcttttcgtctttcagatctgaccgtttatggaagcgatcgataattgaaacacgtttcttgacgccaccatgtccgggcgctcgtgtggtagcccatctttgtcgtttagtcggcttggagacgtggctgttgacctccccgatatcagcaccttgctcgttgttgtccccttcatcctctccattgtctccagggaagcgcgcggaagccatctaggctattggtgcgcccaagaagggcataaaactcgatagaaaccttgattattggtagctggctagcatccggtttgaagggccggaatccgacagcgctcggcgcagagaaagattgtcggtctgagtgcgttcacaggggttgaggacgatggaaacgcaaggtcataggcgatataagtctcgagaaaatcaggggttctatgtgcgcgtgtcgaagatgttgttgtcgaccagtttcgaggaatcgtccaaaactattcaaaacagggtttccgcggctgatcgtgatggaatatgattgcaatgcgacagccgaagggttatagggtgcacccacaaggggccattcaaaatactgaagggaaaaagaaagaaagagaagaagcaccaaagtagttattttgtgcttcgaggggtgggagaaagatagagtagccacctgagcttaccctcgtatggatctcagtacgggagagtatgtaatctcgttaccacccgtccgtgggtgcttaccgatggggccgggccaaccttccaaggaagatacctctgctttgtcattcaaagcgggcttggcaggaggtttttacacgcgtcgactgttctattggtataatttggtatgatatgtcttgcgtctcttttacactgcctctttctcttgttctcggcatctttaggcatcttcattcgtgttggagccagcacgactgcacaatcaccgagactcaaggtaggtagccatgtatatgatctcggactcaagggacaatacatgtaaagtccggtatttataatgtccagccccgttccgacctctccctgctaaatttctgactgtggcaatcggggtactcggcacttgaactatgggacgagatattgatatagttacggagtacatagtattgatatttaatcgctaagagacattggtggattcgtgtttatttcggcctcttttcactagtgcgcatcgcggcactgccaccgtcagcattatgatcgcttacaactaggcttaacgagggattacctaccgcgggtacggagtattctccccagttcttcactatgaaagttgctccgtactccgtacatatccgtttgatccgtatgcaaactctggagtaacggttattattggcccaccgcggttgttttcttcaccccactatgaagtattaatttaacaactggccttttcttgcgttgcaggttttcctagaagttgtagggtacagggtacctcgggacgcatcgatattcttactaaggcgaattttctgtcgtggcagtgtccatgtaatcgatctatatcctatcagaagaatcagacagtattgtgaccatggatttcctttttttttttttttcttcccacgcctcccctaatgatatcagagacccagaattcggggtcggagcatcgatcctgaaaccgacacggcacgagcttcccggtccacctgagtcagcttcccttcactctgatagttatgttttgggttagtatctgccaaattcccaagactgttatgcatatgggtcaaaccatcattggacccgttctctcatttttttatgttaccgtatgcatccctccttgtttcttggcaaaaatagaaaaaagaaaacccttggcttcaggagaatactcctgaacaggctcgatgatcggcgtcctcgtaaaacaagggttcgcggattgcccgggactcgtgttcccctttcctgatagccctaccaaatacccacgtatcacgggtgtgttcctctaaaagcttcgaaaccagatctcgaggcaagggtcttaaagcaaaagcagttgcagtactctgtacagtagtgcaacgtttgaatggcgtgctgatacgacatatgtacatttcagggtcgtcacccggtcgaccacgaactatagtagtgggacccgatgtttagcgtatcgtcgctttagataaagctaattggagtgtcattttccctacccgttactccgtagactgacacagtaaaaatatgtatcagaaagaatcggccatttccatcgcaagtttgatgtcgatcaaacgagatcagtagtaatcgatagtagaccagatcaaccagagatcgccgccactagggatgtggctaccagatctacaatctacaatacgataactaacatacttggtagccaagtatgttttcgacagttcaaggtatgtactcccaatgcacacaggtcagttcaatatcaatttgacctcgatatgagttcaattagtcttaaagtgtgggattggatggttagcgttccgaaggttaaaaatcgccccgtccaggttccacctgagcaacaaggtcaggaacaaagaaagaccgatgagtcagcatctcattgtccacggctgacatcgcgccaaatcggcgcgttcgacgcgatatggctcttgttttttttttaacgagaacactcaacatcactcactcatcatgcagaccataaaagatttatggcttaatagacctacattcgctcatgtcaactcgaacagcacacctgagacgaagagtacacctcagatgaatgaaagcgctgaactcgcgaccgaatcctccgaccccccctcttcctttgcatttgatcaaatattaccacaatctgaacaagatgctgaggcccacctaaatgcggcactgtatctgtcaactcaggacaccctccttcagtcccctacattgcatcaaagtttccaaagtatcgactcagttaccggggtctcatctctgaataagagcctcaacggatctcagcgcatcatcaaggatggcagagaggtagtaatcagctcggatggagaagacacagactcgatatgctcgttggaggacccaaagaatcttttcgctccaacgtctaaggacctgttcacaccggccaaattcactcagaggatatcatcgccaaagaaatacaaacacaacattgactctctagttcatgatgcagtggatgataatgaggtcgaagccagcgtagctcgggcgaaagccaattatgtgcagaagcaaccgaacggcatggagcacggaaacggctcgtccggcaccgctctgaatgaaaccatgttgatctctgctcttggcgagaatgaagacggtgttggaggtcaacgtctgataaatgctattagaagaactgatgctcttgaccccggccgcgcctggccattttttgattgcacacagacattgccgtcagccccccaatttccaagtgatctgatcgcacctgggacgagtatggatatattaaggggtgagctttaaatgagtcgttcgctgcttctttccatgctgaccaattgtagaatctgatactcgcgagcgccagttcatgtcaggcgaatttattcagatggctttgtccaaagggcttttgccggacgaattcgttctgtggatgtttcgttccagttcgtctcataccatgctttgcttattactgtcaagctaacatgcctttcagtaccctatgaacgccgagaggaattgagcaatgcctattaccgaattattaaggtttgtagatgctcttatatcaaacccccattggtattaactaattgaatatataagaatatggatcaggaccgcctaaagctgctcatccgtccggccgatatcaatgaacttttctcacgactaggtgctcggagccaggctttagatccttccaaggagattatcccaattccttcccaatgtatgatttgactatattgcctgtggctctggatcctgctaataaacactgtcagatattactccagattctgcgttgaaagaccatgcaaccttcgtttcagtcctgagattacttagagaaactgctggcttgtgagtttccactccctcaaacccgcgacaatgtaatgcttacaaaattgtagattcgcagaagacacccaagagcaagtggtgctcctactgctacgtcttactcttgatgtttcgttaacagcggattctacggtatcgtcggagcttcagtggaccataaatgctgtcttggatcctgagaatttccatgaaaccagtgcccaagattcggtaagtaatctcctatatgttgtaccacgttcaaagccaacgataccagttacgtcgagtttgcgccactttccacgccacgatacacgatgtttgcatccaaagtcaagttgtgcatcatatcctacccacatctccatggtttgcactgataagatgtcgcctggccgttgcatttttactacggagtcccggtcctctcaccgaaccccctggagagttgcttgatatcaaacgtattacattgttactgctacgggatgagcgtttccaagttaggcgattcaaaggcatagccgactacgactggagggaattaatttcactcactgctcttctcaacgtcgcgattgattcgtctgcgctagcgttgaatttcagcagtactcaacccgagaaagactatgacgctgccatcgacaggctggcagctcagatcaaaatgatattttgttctattcaggattccggggcctcacatgtgacacggacagtggccaaaagtgaactcgaggccttgcattaccgaattgtctattcggttcggtccaagccaccgccgaaaaccactattttcgagtcacatgtaaaggagagagatggtaacattcggagcattttcagcacttttgctgcgcttgctgctgaaaagcagaatcccgaggccaagcaagaaacgaattcgtttgcggcgccaggcgacgcggataatggtgacaaagatattcccatccgcgcgcatgatcacgtatcctgatcacattggcattggcagtttgagtcccaaaatctccatttcactgaaatgggttgatgatggaatacccgcccagtttttcccgtctgccaccactctgacttacgacccttatgatcatgactttgagccaggcgttttattacagtataccaatgtattcaagcacgtatgtagaatgagagcaatcgctaaaagagttcggtcatattccaaaggagacttgaactgtgcaaagaaatcccctctatttgtgaagatggccaagagagacaaagattatctgaactataacacacgaaacacagcagtcgcaaacgtgaaacccaagacagaacaagtgatacacacttagtcgtagaatttccggttcaagttcttgccaaagagcgtctctcgcactgcaggaagagcatcaatttccagcagccgcagacgctcctcgaaagtgttgttgatctcaatcttgccttgcccaccgacaataaacacaccaccagcactgcgacctagttagtccccttggcgtatattgagagggagagcgaataaactcacgatccttctggcaatggctccgactcgtccaaagtcacggtcacctccgagccaacatggtccttgtactccttggtcgcctcctcaatagcatccttggtaataccgaagtccttctttcgcgagcgaatcgcaacgttatcctcgttcagataatacagaccctcgaggaccagccccttgagcatggcctggtacttcttctgatcgtcggcagccaccttggaaaccttctcacgggcattctggaacaactcatcgagtagctcctgacggccacccagcacgcggagtcgggtcttgttagcgagtgtggaccgggtgatctgctgggacatggctgcctgcttgaacttcttctcgtagagggtatcgatggccgcagtctcctggcgcacgagcttggacttttcgatagcaaactcttcgtcggccttcaactgaatctctcgggccttctcaagtgcttcttgtttgatgaaggcggtcatcttgcggagctcgcccgcgacctggattggatggccatcagtccaactcaagcctcccaatacttagagtaaacggcgaacatacctgatcatctgacagagcatggctttgtgacattttggcggttcactgctgtatcgcctgttggggtggaatgacgtggggaaaagggaaaggatgttgtgtccaactaagctcggattgcgttgccttggcgttccgcacccaggtcctccgcactcccctcgacaacttgccatttcagcgcgatcctatcgttccctataattttacctgagctatggcttctttactccggtagtttcttctacttgatgcgcctttcctatcccttgacccgaccaatgcacgatacacaacatgggcaatctaggtgacttgtcgccggagggaagtgttgcggtaagactacggaaatcaggatatacagcgagataagatccaaagctaattatgtatcaggttggtgtaatcgttggactgatatcaaccagcctccaagctatcgggctcacgctccagcgcaagtcgcatttgctcgaggatgagaagcacccctacgatgtgcgcagacccccctacaagcgccgacgatggcaaataggaatggggatgtttgtcatttccaatattgttggaagtaccatacaaatcactacacttccgttaccagtcctctcgacgctccaagcggtcagtagttccccctccatgcatgccggagattggttgctgataggaatgccgaatagtccggactagtgttcaatactatatttgcgaccctcatcctcagtgaaccctttacccgatattctctcgcaggcaccgttctcgtctgcgccggcgcgttgttaattgcgaccttcggggccatcggggaacccgcacataccttggatcagctcctggaccttcttcagcgacggtcgtttcttctgtggatgggtgccactacactcctggttgtcctggtacttgttggtaccaaaatgctgaaactcttcctaccgtcctcacgcgcgaaaccctcggcctctggtcatttttcaccacatctactgcgattgcaaagccgaatgagattgatccgcggcatgagctatggatttgtcagtggtatactgtcggctcactcccttttgctagcaaagtcggccgtggagcttctcgtgcgcacaatggtagacggtgtgaaccagttcaatcgttggcaatcatgggttatcctgctaggaatgatcttcctagcactcacacagctattctatctccataggggcctgaagctgtgtagtactagtgtactatatccttttgtgttctgcatctataacatcattgctatcttggatggcctgatctacttccggcaaatgtcccagctgacgggcttccacgccggtctcatcgctttgggaacaatgattctcctaggtggtgttttgtgcctgtcatggcgacttgaggatatcgacactcataccgctgtcaccactttgggttccacgcaaaccggacttgggccgggtatgggaatcgtggaagagcactctccggcatcacctggtttgctggacggtcaggatgaggaatcacagattagagaatgcgagccacttctcaacccgaaaacccatactcgccatctttcatatcagcggggaagagctccgagcctgccactcaacttgcattttgatcgcgactcagctgatataaaccccgcatctatttgggctgaactcgacgattcggactatgaatctaccgatggacacagacagtcctccatagatcgcctgcgtagcgtcagtggtagtgcaaccctcaacggctcattgcggggtctgacacggcaatcgacgaccggcgctactacacacgatcgcgaaagaggatctcgccgaatccaagaaacatcacgtgaggacccatggcttcgcacctcaggacctcagagtgggttatcggccgtccatcgtaaacgtcgggggggcggggatccgttcacctcatcgtctaaccaagacatcggtgggtacggaaccatccaaggggatggcgatgatactcactggcgcggcgactcccctatcattcgttcgtctgccaggtctggtcttcttaatggctcaaaaagggctctggcaggtgcctggaggtttgggagacaatatctgcctcgatggagtagcccgccggctgggattgacccagaagatggctcttcctcatccctactcccccactctggcgtccctcttccacgaacacactatccacagggaatcccggttcctgaatctgacacctttcggccatcgtcatccccaaccacctctatataatatcaatcttcgctccaacctataacccttgccttcaggacactaccacctcgggcttctctttgcttttcgcctttcaatgcctatgtacagcggtccctcttccttggacataccgcaatccacttatgttgcttccgtcgctcatagctcgcggtcgggaaaagaccattgccggtctctcttttgtgttctgccatccactgtctagataatatgatatgataccacccaatcgatgatatagctccacgcgaatgaatataagaccctgatacaattcccgtgctctatatgataatgcagagattctaagaacaccggtcacaatgtctgccaaaagtcccttggctgtggcactgacctctcatatgcaggtccgcgatcctttctctctacatgcacgccaaggtatatacgtctttcggtttgaacgtagattggccagatttgggacaaagtaccagcccagcagtcatgcagaatatcaaagtaaagtgaatctcattggtatggaaggttgggaatatatctgacaaatcggatcgtattgttcgaactggactgaattactacccgagtgtccagaggccgttttagactacatggtctaacaagtacccagaaagcgagaatatacttcccattacgagattcggtatcctcttaggctgcatatcctagcgggaccgcactacatggttggaacggagcaggacccaagtctaccacagaccactacgaatacaacaagcaacaaaacaaaccaagagaacagaatccgattgctccgtaccatacataatgtaactcagccatgagccatatcggtgcgaagtccgaaccgaacggcgttgagaatccgtcataaccaagacagacggtctcgtcatggcatagaatcaacagaaacaataaacacacacagcttgagattagacaatgaggaaaataacataatcagtggacaaagaaataggttaaaactataagagcaaaaaagaccacagaggaaaagccacttcgccgacgagtttcaatgcaccacgaacacctccatcctccgccattatctaggtagaggggggaaaacaaaagccaaatttgcctgcttgcgctctctttctcttttcttgaagttggtttcttttttttgacggacattttttttgcgtaagttttttttggtattggaaagccatagttctcagcaaattgggggtctcctttttccgagatagaaggcaatatcaaaaggataaaccagatccaatatcatcaaagagagaccggaaggcgattccagcgcggtgcttgacaatttacaaatagtctcacgagagtgccctgtagaatggcgcatgcagatacagtacgaccatttccgagggaagggtgtgatgatggatcggcacagagggagacgggtatcaaatgaacgcgagatcgaggcgcagggaggaaagaacagagagaagaagacgcagcatcggggacctttagcaaaaaggaccccacggatcagatcataattttaagcatttaagcagtgggttggtgctggggcggcatgcgaccgccgaccggcatggggtactgaccaccagcctgctgttgctgctgctggaggttttggtagtacgccatctgctgctgctgctcgttggtcatgtagcctgggtgaatacctgggcgcatattaccctgcggtgcgttgacgttgttgtgagccacatcttcgggggcctcgggggcaacatcgggggcgtcgacaccgttctcactggcggctgggtcgggagcgttgaggcatgcctatcaggatgttaatggatgaaataatatcattgaagtagaccatggcttacctggatgaggttcttgccctcggccttggtgaccagcggctgaagtttgggggtagtgaaggtgtagacaagaccggtttcagagacgaccaggagaagaacttgagtgccagtcaagacagagagttcataggcctatagagtccgatggcgattagttaaaagtcccaatcgatccaagatagaggaaaaagcctcgatcggggaactgatgcggagggggcctcgggacgcgacgcaccttcttcatgatgccggccttccgcttggagaaagtaatgtgccgacgcgacttatcctggataaacttgatctcgatcttgcggcgctcacgaccgggcttgtcatcatcatcatcttcatcatcggcgctcatgcggttgcgcttggtgccacgggcgtcggcgccgttgccgggaaggtcatcgtgaccaggggaaagcttttcatcaagaaccgcagacatattggcaataaagacgaacaaaagcgatttaatatgggggggggtggttatgatttgagggggggataccgaaaggggaaggcaagagatgacccaatcgagtaacgcgtttataggatgtgagagaaagggaatgggggaatcgatgggggggggggagagcgaagaaggcaaagtgcgagttgcgatgggcaggcggtctgttacgtggatcacgtgtacggctggtatgagtacaatctgtacggtcagataggttagagtacttctggtactgatgaagtttctatgagacagaagtaccgcgaggattatgcttgtattgtcttgtaattgagcggtattcgcctcctccaggccagacacgattcttggctctgatcgcttattggctgatttcccttcggcccccccgttttccgttttttgcccttttcccctctggtctggactctttttcctttgttgctgatttcccggacggccctaattttggttatttagcccttttggacttggaatcgacggtaataaatacgaaatattgagaattaagaattaaaagagatatgtttctttcgtactttagtacttcattccatttcacatgccgcgacggggcagaacttctcaaggtccggtgctatgtgattggccttgaaacatgccatatgagcatttctatcaagacgctatggtcctatttcgaggttacatctacaaagtcgaatgagtataaatctgtgctcgcatcacacaagcgcgggtcgcacctgctttgtggcacgaaataatggccctgtatacagcgtactcgcatagctgcattcagagtacactgtaaatagccccaaagcgcatccatccctgtcaccactctcttatctctcttatagccattctcatcccctttctgattgcaaccacaagaaccgacctcacattcatcagggcaccagagtacggagagtactaggccacggtctcgacacaataatcccaggcatttcagatccccttgcacacacatgcataccttacatagaaactcgtagagcccctagggatactattttggggtctcacggacgtagatttgccaaggtacacaacaatcggggtggcttggtcagtaggccttataataaaagttaggaatccagtcagggtaagtttctgcctcttctattcttactcatgttattactcccacgtcgacggaatacagatgtacaatatctgcaatttcttcgttgatctggtttgatattgctctaagcatcaagtcttgccataacccccacctcgaacctgcccaggtgactaccacgcggccttaccgaatggcaggtttcttggtcatatcgacagcctcgagagcgaaggtcgaccgctgtcgactgttggtcatcctactgaatccatataactagcaacaatatgcaaccagagccgatcaacgggccgatccgaaaagccctagacccgatgcagcggagtctagctcgctcgcttcaaggttacttcctgcataccaaaaaaatacctcgggcaacattggaatgacgaaaactgatcatattcttcacataatgaacaaaggtccaacgctaatcaccaacggagaccccaaaccgggtctgctgtcaagtctatttttacaaaaaggatgcaaggcatagggcacaaaaagtggcttctcccaaaagcgcacttgaggccggaagacatggaggaaataggaaataaggaaagataaaagcaagaccaagccgattaagtgtggtaagcctcggccaaggcccgcatgggcctagggataggaagaccgtaaaggaaagccacataacatttcaaaaattgagatacaccgtcgggatatagagggaacacaaagtcaccaggttcctgcaccgtactggactccgccaatgcaacgccggataaatgaaacagaaactggaggacgcggagggcaagtcacgatcacgagtctcatccggaaagaaaatggctgttgggttggtcgattttgcaatcatattgggctggtgtcgtgaagtcgggaagaacaaaaaaaggaagatgtgtagtatttgagaaaataagaaaaagagcagaatcatgtgcaacgaagtgaagaagtacgaccaacagtcccaaggaccagcctcaagtagtaacggtgcatttttattgctggtaagtgccgcgaagatgatggtcactcacaccaccgccaccaccgcccttgggaccgagccagactatctcaatcacgctgtggccctcatcttcttcgcgaacatagaattggtgcacgttctcaccgacaacgaatgcatcacgaagcaaccaccgatccttagcaacgccatcttcctctgcgggacgcaagggacccaggcggtcttcataaccgcgggggtcttctggccaggtcttttcggtagcatcaaagttgatagcatcatccgccacattctcgccgtacgtatatttcaccagcgagtagccgttggtcataacccagaagtgacggagagtctcaccagtagcgctcacagactcctcctggtcaaagacccagcgacggagaacagatttgcggcctgcagcagcagaaacggtggtcatcttgaccacgtccttgctgtaccaactgttccagtggtgcattgattcgatcttgcggcctgactcgtaaacaccgtccacggggtctgccatgtccatctggtagagcgaaggccacagagtcaggggggtgtcaccgaaccgttggatacactggccaagcttctggtcaccgggctgctcgccccaggactggcactcctcgtagtgcttcatcaggacatccaaaagaggcttcgagacaaacacaccggcaccaccgaatgcaatgtggccgaaagtatccacctgccagctggcctcagacaaagatccaatgtagtgcttcttgctttcatcgaagagcttcaattcctcggcgatagtagggagcgacaggaagaaggtatcgtcgtcactgaacccaacccaggcggtgtgcgggcggtgcttgcgaatgtgctcggtgaacgcctcgaccataccaaagtaacgggcagtgaagtcgagaggagaggccttgagggtcaagtccagaccgcggttgcggaagtaagtctcttgcttctccaggtcgtcgtcagactcagggaccagaacaatcagaccggccttggtgtttccgtatgagtagagcaaagagggtagcaggcggtccaaacggtcgactgtagtggccagaccgaaaagaagcttggaggtttcctcgacatcgtcatcggcggctacatcgacgtcgatgatctcagggcagacaaagttctccggcttgttctcgggagacacgaccataccgcgctccatgacaaccataggcgggagtacaggcttctcgatttcctccaaagtgtggaactcggtgcgagggttcacatgacgaggacggaaataggcgcgagtgtagttcttgcgtgggagccattcggggaagggaaggggggcagccaatttcgggtcagcctcacaggtgttactggcaggctgctgcgaatcagattgtgccgacgtttgtacttgaggttgcttgtttccactgaaggaggcacggtcaatcgggtgcttgaaccgaaggaaggctgagcggtcgtagcgttccatgcaaaagaaaaatattccgatggtcaccagagccaccaacgggaataccgtcttcatccgaaatagaggcattttggctcttccagtattaaatgacgacttttcaaacatgtaaatagaagcaggcgaggcaaaagcgaaatcggggcagatgaaccctgtaattaaaagttatgggttcgggcgtgcgagatgtcgtatcccggaaatatcgtgcagaaaaagctggtagcaaaacgcagtttccacttgagagaagggtcaaagaaacgagtgtctccagagcggattaaagagtggcaggcaaatacagtgccgagatatttcaacgagaggctggcagcgtcgggacctgcgacacggtccaaaggggggaggggcgtttgtaaagggaagtaggaggactggaagagaatagaaaagcaagactaacgcggctggacgatgtgcccagtccgagtgaaaagtcgatgagaggatgtaggattgagtcgtgaagttgttgtaggaggaaagaaaaagggaggccgtcgaagcaattaacggggacaggttggccgtgtatgggtattaccgtaatatattatttagatcttttctttttttcacttcttttttcaatccgttttctacatcgatgtacatgtctacatatctgacgttcgcgccatctgccgtttttcgtttaatatgctgtcttcagtgatatttggttatattggagctggatattgatatcttggtattcatcgcccggttgcggtgtgcccggttgggatgcaggaacagagccctgcgataacatcataaatgatatgtggcttatactttgtttcctttgcttcgttttgccggttggacctaagtgtcgatcacgacggaaaaaagaatgccgttggctgggagggatcatctccctcccagcagcttcagtggaatacgccgccatgaaaccggtgatcagcactggggttttttttgcatatttttcccctgtctcgagcacaacaataatgtttttgtctaacctgggcacagatgtagtccttcaagtcggaaatgggcatattgaccttggcattccagaacaagcatgtttcaagtatcttcaacgttgagcaggctgtttgcggcgaggatgcaagctcgcgcgaaggtgccgatcagctgtttgtggcatcatacataaatttgtacgatagaccagaaactcatctctactaataactccgattgctctctccctagcgtctctacatgtatatgtatgttgcacggaataatgagtacttgtatgtacatatctgcatatagatactactatgtatagatacactatggatccgaattcgtcggcacattgcacctcactgactgcgcctgaccctcaatcatccagcaatggacaatataagcgactacctaggtacgacatccgttcccatcctgagaccccatcatgatgatgtgaatataataaataaccacattgaactagaaatcacgtcaccgttatcaaggtagcgcttggaccatcgaagtaaagtccggagtcttggaaagtgtgctaactacgaactacaatgaccccagtatcaaataacggaaaggacaggtatacacaattgtcatccatattaagaggcaaaaaaagagccagggaaatgatccagagacgatcgccctagcaccccccagccgcgtcaaccagtcaaaattagccggaggggcaaatgaggccgacgccccccacagacacgcgtccttcctgacgacgttacgacttgtgtaccataatgatgggcgctggtacggagtatatatgtgatatctgggtggagtttcagcccgtacctaacctgttattccccctgttatgtattcgtgtcacccagggatgctccgcaattcgcacggtatattttccaatgaaaaaaaggagagaccctgaagcttatcgggtaacgtatttccagtggcgatagtatctcttggtccatggatttcctcacagggtgggccgagatcgacaaccattgaaatggccctggtagtttctattttgatatattgtacgagcggctcaaattcctcaatcaccatcacggctgatgacgggcctggttttgtagtctcagcatggatcagcaactcggtcgacatgatcgaatctttgatggccttgcaaggggtgaccgatcgctctgcgataagtattcgtctacagcccagcggtcttgagaccccggggcggatcttcttcctgactgttatttatgcacttcctatgtcggaagatgctgggccttttgttggctcctgcttttcgtggatgatggcaacgtggaccttccagactttcgagttcgctctagattatacgggactacgacgagcttatctccacgggcgttgcgcgttacatactcttcctagagtttaatcgccaagacttcatctatagttaatttattgatttatccaagttggcggttgctttgattcttactctattgaatcactttaagtaccagctatggaatgccgattggtcatgtatggacaccaacccgggaagaagacattgatttctctggaatcctcataatagtcagaggttaagtctcccttggtagagagccagtgcaagggttctccctgggcgctcaggcctctctccttgggtctgcatgttggtcttaataatctgtactccgtaagttggttatggtgctcgactttgtaccgagtcctttacttatgtacgcgatgctgatagtgggatttctgtagactctgaactatttggtaattacgacaatataataagttagaaaataacagagatgtccaaattcctctctgtcaccattggcataataggacgggtactttgacttctggattttccggtgaaccacttacgaccgaaggcagtctctgggacctggctatacgttgggatatcagatcccgtaggcactggggctggagattgagtcaaagttgccatggtttatacaggatattggaagaagatatataaatagaatatatcacagcgagttggagtaaaaggatcttgttatagagacaataacgtgcattggattgcactatatcagacagataggtgttttattaagatcgcgatatccttggttttgaaacagccgctaatacctacacggtcatgtttgtggattttaagcttgaatggtcgtcttggcattgtggtcacagcggcaaaagggggagatatcgcgctcaagtgtctttctgtcaacggtattttctgcatagagtaactactccatactctgttatagaacgaccagtgcatttctttttccgtgagtttggcgatgtttagtttggcaatacgccgcataaccttcactttatatgcatataaagtcgaagtgcctcgaactgctcgactttcatcctccgtcgcctcaccatccaccccattcgcctagacatttgagatcctagattgagtctaaaagcatacatatttccgagtacaatgctcctcacatgctcctaccgaaagctagtacatttggcaagcgcctgggaatttggccaccagaatatcttctatattataatatcagaatcttgacattcaataagttgcttctgaggctataatataccacactcaaggttttctggaagattgatcctggcccatacttcaagactgctctcggtcttccgaggattcgccatctgattcttcagataacttgcaagataaagcagccatgcttccttccccgtccaatacccgcgctggatccatagcactttgatatgctccagagtttgcaagactgtagcccccctccctccaagtcatagggccagtactggcacctttatcccatgacaaccgaaactaagagcctagtcagcggagtccggctataatgaccctaataagacgctcaaacactgcgtaattcttgcccctaactgctagatagagtggcatctgaccattcgggttcgctccatgatccagtaaaaaggtgaatacgagctgaagcctaccagcttcttgacgcagcataggctcttgtgcattgcccatggggatcctcaagcgaatatgaaatggattattttccagttgtttgtttaaactacaattcgcagtggtcgcttgccatcttcatagacatattccagatccaccccttcaccaagaagggctttcaccacgttgactcgatcatatttaatcgcttccgctagtgtagcttggtagttaccatcctatattgtgcattgtagagtttactctgtgctattatttccatacagagctagttccttttctttttcctataatatttctataataccgcgaagatatatcctggcttaaacggtcaccccttttggtgttcccttttggtgttcccttttggtgtttaaaaccgtcgactgctctgtgaatacttcgcctctcccccactctgatacggtgggctgacattcggtgggatagaatattgtacttattcatatccacaggataacccttcacatcacctctaggaagcaacagtgataatatgccacagtttcaatgtcaggtcccgggctgcacttcgatgtcatattcgtcgcaatcatgaagttcccggacgatctctcgctcgccccatacaggcctgtatgatatgaggtgtcggatgattaaagcacggttccaaggaggcttgccatgtacagtatagagtgttctttgaagcgaggcatgtgtatctttgatggtccagtgcgccccgatatcgaggtcgctcgaccagattccgaagaggaaccctgggagtacgggtggtgaagatgatttgatcaataccttccactaccttcctcgagaattccacccaagtatagaagaggtttgaagggctagatccgagctgatctcacttcgagagacaattgtggcaaagccatcggccaccgcactaaaatcgtgggttgcattttggtatggaaggaagaaccgtacattagcctactgccttctgtcgtggtaattgaaaccatgtgcggaaggcgcggtgtccccacgtgccgcacgagtataaaccccccctcccccccctctccccctctccctctccccttcacccttcccaactcctacttgacatgcgtttctgcattctctcccgtgcgtggtatgagttccaaacgtgttgttcggtgcagattgtatgaggcgttgtgatataccgttccttggatctgatatattatcggaccttgtatacatcgacctcccgatgatttttgtaccccgctgtattcataggacatcatgtgaaagaaaaaagtcggtcacaaacaaggacatatctcagctcgtagatttaaatgctgtacaagaacctggggtttcgatcgcccatttcttggatagcctgctctgagagcgatgatattttgtcgtcctccaatccctgggccctgcgtttgttgataacccggtaggaaacccacatgacaccatatacaacccccgcaaatcccaccattgccagagtgacagcgttcccacggacgaagcgcgggccttccgaattaggatacaagaaaggggacataactccgctgatgttgccaaaggtaagctgcaagccagttgcgtaggtgcgttttgcgtatcggggcagattggtaggcaaccaggcgagaggtaagccgacagcaacgtaaagtcccagggcgaccatcaaggcaccaaagtaatgaacacccgaggacgagtccgaaatcaagattccatagccaacgactgagatagcgcagaagagacatatgaaaaatgcacggtgttgggtgcgatcgctcaaccaggcaacgcacagataggcaaaggcacccagtgcatagcaagggattgtcaatgcctggacctcggcggtggtccaatttcccatgcctttgataatagtaggaaggaaggtactatatccatagagcatggtatcaataccaaactggccaatggagaacgcccagatcttccagtctaagacaccctcttttacatccgcccagtgaaacttctgtgcagactctgtttggccgatataacgactccggcgaagggtaacaagcgctcgctcctctttgtttagataataagctgtgtccgggtcatctgccaaggcgaaccaagtcaccacaccaagtaaaactgtcggaatcccctcgatgatcatgatccaacgccagccgcgaagtccacagatgccgtccataaacccaataccataagccagtaacccgccaaaggctcccgcaatagctgcactgctaaagaggtagcttgttcgcaaggcaatctcacgtttgctatagaagagagtgaggtaggtgataaagcccgggaaaagacctgcttctacgactccgagtaggatccgacaggcaaccaagtcaccataatcccgagtgattcctgtgagggttgcaatgataccccacaaaattgagatcgtggcaatataccgagacggccgtagtttcttgagtacgagattcgaagggacctcaaagaactgaacgtgaggattagcgtccgtgcggtgactgaattgcgtgatatacatacacagtaggtcacaaaaaggatagacaccgagacttggtactggttgccaacaagccccaagtcctcttccaggccgtacaatcgtgcatttccaatgttgactgcatattcaagtcagccaatgttcttgattccgagttggcacaagctagttgcaatcacaaagggatgagtcaggcatcccacccccacgtacctcggtctaggaaactgaagagatacaacaacaccacgataggaaggatatgcaggtcaatcttcctgatcagagttttctcgatctgttcttcatcaagagttggccctaagctgatttcatcggctgggccgaggtcaggctcagcatggcccatggtgcgaaagatcaggtagaaacaatgatagtggaatggactcggcccctgggcctaggtgtgtcccccgaggtcacttcaattatgttccaaggttaagaaaatgtcaggccgaaagcgagaaagaatcaaagttgccaagcgccaagaggtcgggtaacccttgcagccgattgataagagaaacctacggagtatgtaactgtgttatactttttcttatttcttcggattttgtttgcaagtcgcatcataatttgaaatgtagatattaaactaattaccaatgtacctgcgtagtcctggttaggtagtcctgagtatataacttcctagttcgttgactacctcgagattcgcatatgctgacgtaatatataaggcgcctgaggtctaacatggatgcatgagagcgtgatattgtcaatacaagtcaagtccgatatggcaagccctattagatctattaataggacctagagcaaccataggacatgtatctagctgtagtaaattgttgtggttgtcacgtgccgatcacatgctgatgtctggtttgtcaggcttcacctagctaaatcgctagatctcgatcgttgtagggaatgtaaccttctacatatccctcaccgctcaaggagatcttatgcgagtggctgagaagcacccggaccttccttctgggtctcttgtcctcgaagatcttccagacgtcgttgggcctgtcgaactcaccacggacaaaatcaggactgtgccgcatgatctcttcgaggagggcgtttaaagcccgttgaaggtatgattgttcattctaactgaaggccaaatttgacgacctgaaactccaagcggaacagaaaattccctcgaaggctctgggtgatttaaacctggaggaggtcgagagtatctttgagatccagccgcttcgatcggagaatgaggagctgggagatgagtgggacttacgacccattctccgagaggagttccaaaccccagctgcctttgacgaattctacgatttcctcagtaagtactgtgtccttatggtttccaagtttcactcactcatctatgaaaacagtgaaatcctttgaatacctggacgttgcctaaggaaagtccacccgaaacgaggcatatatacgctctcgtttggatatgatccttaactttgtgctcggctttataaagaaggagggaagcttactcgccagaaaggagctatcgtagggatacgagacgcacttttcctatacaatagatatagcgggagttgcaacatttctttgctaccttgctatcttactaccttgctatcttgctactatgcttggtctatggaacttataacatacctaccaaaagtgaaaccaaaatcatgatactgtagctcttatgatataatgcaaaaatccctcgtctggcagcatggggtgccgaggctttgaagtacctttgtggctgctccttataacgaggagaagacactaagttttgtatgatcatattttgagtatatcgcctatatacaattaaagacgttttggttgacatgtcctattttgaatattctaatagggttgggggatcgggtcggccgggaattacgttaacaactcggagtacctacctgtagtgtgcctcttcttagaagtatcaaagtctacatgtaccctagacagcaaaatatgaaggtcagcagatcaggatcgaccggcctagcctgcttacctaatggcaaatcccgctgtcatttttgcctatttgtggctattatttgctgcagaaagaggaactatcactttctgattccttctgcaccatattcaatttggattgatatctgccatgaacgggactttttcccccggcgattctgttccccccgcaatgcactgctgacggacacacaatctcttatgacttcacttctcactatgagaaatccttcacgtccacgcgttttacagagcttcacaatcaacttctgaatcttgctatttgaaggtttgtttttctttctccaccatagggagatctagaataacggcatcctgggtctcgaacaatcaaaatccatcaaaatcaaaaagtaccgcttcaagtggaccaatggcggacttagtcattccttcctttgggaggctagttgcatccaaaactcttgatggccatactggcttcgtttgggatgtggctctttccggcaatggtcaaatcctcgcctcaatttccaatgacatgatgatccgtctatggaacgccaacaccggtctccagcgcggcgccgcaagaaacaacggccattccacgtgggtgcgctctgtgaggttttcccccgcaggtcgattcttagccactgcttccgatgatatgaccattcgtatcagcgacgtgaacaccgggtttacctaccgcatgctgcagggtcacactggcaaagttcgagcggtggaattttcccccgacggcaaaactctcgcttcagcctcagatgatttcactgtgcgactgtggaatgcaggcttaggttcgctggtcaaaaccctcaatgggcactcgggctgggtgcgcgctgtggccttttcgcctgacggcaagactgtcgcttcaacctcggacgataatacaattcgtctctgggacacaaccaccggcaaagaaatccatcgattaaatggccatgaatcctcaaccagggccgtctgcttctctcctgatgggaagctgctagcgtcgggttcgcaggacaaggacctgcgcatctgggatacgaattctggcgccatgctcaacgtcctccggggacactctggacctctgcgcgtgatcgcattttctagcgatgggaacctggtggcatcagcggccgatgacctgacaatccgcgtatgggctgtgccattagggtttacctgcgtccgaatattaacgggctactccggatgggttcgagctattactttgtcgcgcgatgaaaacgtagtagcttacacgtctgatgacatgactatcaagatttggatttcggcgtgattttctgtcgtggaaggaagatccttctcgttgatgcgcgctttgtgttgaatttctttttatctgagatacccaccaatgttcttgattcttcagctcgcatgcaatttcttgcgattagcaatcaacttatttttaagtgatgaaaagccggaaccaaaacccgtctcctttacctcgtttgaacagttgggtcgaagtcgctagaggcaaccaagatcttccactctgctcaagaacactacatcaggttttcaagtccacaagtctacttatataaaatggcagatacgcaaacttgttgggtgcttcgcagatccctacctgttcccagtgtctgcattgatatgactcactcggaatattttccaggagtcaatgggacagcatgtgttgctactatcccaatcgcaaatgctttttggcctagtaatctgctgatttccatcgaaatttctgactcaattcgatggaatgtgcccttcaacacttatatcctgcagtacatatctttacttggactgaaaccatgggcccatcaatttcaaatgacaatcctcaccaagtctacgatgaagttcataaacgcgcaatcacggaaaatgccttccaggagaaggctgagatacaagaaactcaccagtccttgaccattgattttgaggaggacgaccccggaaacccactaaactggcccagatcaaagaaatggattatgacaactgttgtgtccctttcagtgtttctaatgccactgtcttcgtcaattgtcgcacccgagttgagcaccatcaaaggcgaactgcacatgagcagctcactagaagcagtcctggtcctctcgaccttcgtcctgacctactgtctcagccctctgatactaggcccactgagtgagatatttggaagagccacagttttgcactcgggaaattcattctatttgatcttcaacctggtgtgtgggttcgctcggaataaaggcgaactactcgcttctcgtctgctcagtggcgttggaggcgcgggtggacttgttgtgagtatgcccctcttctgcgactagattttgttctaatgcgccaaatataggtgggcgcgggtatcatcagtgactgcttttccaaagaagagcgcggctgggtcattgccatctacaatctcgggcctgtctttggaccttctctgggagctgtcattggtggatttactactcaatacacgacatggcgctggacgttctgggcgacatctatcttcgacggggctttgatcgtggttggtttgcttgttatggaggagacatatccacctgtcatcctcgcgaagagaaaggcgaagatgctgaaaacggccgtgacaaacactcctctattgaagacaccttatgagaaaccagaccagagtctcggccagttataccgcaactctcttctccgacccctgcagctcctcagagtccagcccatcgtccagatcctagccatcttctacgcctatctatacggtctaatgtacttggtactctcgaccttcacaactctttgggaagagaaataccaccagcccgtcggtccagctagtctaaactacctcgcgctgggaatcggatatttgcttggttcacagatatgcggatttcttgcggacccaatctacagagccctgaagaagaagcatggcggaaatggcaaaccagaatttagagcagttctcatgttccctgcctcgattctcgccccggtcggtctgctgtggtacggatggggagcgcaggcggtcacgcattggattgtgcctgatcttggaatcgggctgtttgcctgcgctgcgatgattctgttccaatgtaccagtgcatatctgtatgaagcttttactttgtatgcggctagtgcgacgggtgctgtttacattcttcgtggattgacggggtttggatttcctcttttcggaccgaggatgtatcagtcgttgggttatgggtggggttctactatgcttgctcttgttgctattattatgggatgtccggtgcctgttgttctctggaggtatggtgagcgacttagagctcggagtagttatgctattgggtaaagtatggatgactcaaaagcaataattcacttgactttccacgcattatggaagtaggatgacttcataaaacgggcgcaacgcatgaagctaacatcaagctatgtaacctcggttcaattctcctccgcattaccgggggtatagctttccccccagctttggacttggattctctaaccttccaactatcgattgcaacgatttgcaatgtctgataactacggcagctaccaaacggaaatctacggcaagggtgccttaatgagcatcatgcccggtgtaacaaccgaccccaacaagctagaggggcaagctcgacaatttctgggcgttcgcgcattcaattatgtcgctggcggcgcaggcgagaaagcgacgatggacagcaaccggctggcattccggcagtggaagctgtaggttcgtagatgtttattacagtattcgaacactaacggatgagatcgatagaatcccacggatgatgcgaaatgtgagttgcggcaatctacaataaactactattacgttctcgctaacgggtgacatacccagacaccggagcaagacgtctcggtcgagctcttcggtcagaaatacgataatcccattattgtagccccggtcggcgtacaaggtattttccacgaagacaaggagacaggccttgcagaagtatgcgaggaggtcggagtgccatatacgatgagcacggcaagcacgagctcgattgaagatgtagcgaccgccaacaaggacgggaagcgatggtatcagctgtactggccgaaggataatgatattacgctgtcgctgctaaagcgggcgaaggagaacgggttctcggttcttgtggttaccttggatacctggtcgctggcgtggcgaccggcggatttggataacgcctatgtgccctttatcaagggggtggggaaccaggttgggttcagcgatcctgttttccgcgcaaagttcgagaaagaaactggatcaaaggttgaagaggatatcattggtgcttcgcgcgcgtggatcggtgatattttcgctgggagtccgcattcgtgggaggatttggctttcttgcagaagaattgggatggaccgattgtgttgaagggaattcagcacgtggaggacgcgaaactagcgctgaaatatgggtgtgatggcattgtggtatcaaatcatggtggtaagtcccttgattagctttttacatgttcttcctctgaacttttgtccaggccgtcaagtggatggtgctatcgggtctctggacgttcttccagagatagtcgatgcagtcggggacaagatgacggtacttttcgactccgggattcggacaggttcggatgtgattaaggcactgtgcttaggagccaaagcagttctcgttggtcgaccggtgatttacggactgagcattcagggccgagacggggctagacaggtgctaaagggtcttttggctgatttgtggcagaacatgggcctatcgggtattcggagggtgaaagattgcgaccggagtcagattcgcaaggtgcaatacggagaggtgaaagcgatgatgtagagggaatcagacctggaacgtgtatagaaatcttggacgtcgatcacatgtgaagggcccatcctcgaatctcgattgttggggtaccaactggcttacgcctacacggacagccttgaaaggccactgtaaatgtaaaatttccatggcttgaatattctcattcttgatatgtttacaaaatccaatgaccggggaaaacctgatatcgagacgaacctcgactatgcgcacgctcacattccagcctcaggatcaactctgctcccgcgaccagtcgcgtcgttgatatctttgattacacaatcaacctcgctatcgttgcgactaggtacattctttggcggggtagccctggatggcgcgcgagctacgactttgaccagcttagaactaagccgggctttggtcgaggggatcttgacgagggcaggaagagatgtcgccattcgtagtggcgatgaacacggtaggacagaagccgagtctctcctcgagcgaagtgtatgttcctaaatcctccaaggctgtcgacttagtcttgactaacaccctcctagttggcgacgctccacacgaccgtgacctcggcatctttcttcgcggcggcgacatttcatttctcgtccaccaccttgtcttcggttgcaaatctctcgcaggcacttctgtctactctggatgccattcttgggtccaccgagtcttcgagggccattgcggccattatcacgctgattcggcgtgagtttagatccgttgagcccggcgcaagtactaccgagaatattggtgtcggagacctcctcattggctccctaggcttcgcgctattgcagcgttggggcagaaagaataccgaaagacatctccggcagaatggcggggatgaaattgtttgggatgttgtcatcctagacaacggcgcacgagcagacgtgatcggatcccatcagctgcaattccccgagcgcaataatgaagagctggtagagcctgacagtgcttcctttgtgatgcctggaaatggcgagaaagcatttgatgtaattcgacggtcgagcgtgtctgattcggttggacatcgtctctctattccgttgggtggccagcagcaagtgtccgacgaggatattcgcgcttatattatgagccaacttcctcagggctgtcacgcatctatcaagtcggaaactctgacggcgcgaactatcacagtcgatatctacgatgataatatggcagagattgccgccccgcctggaacgaaactgatagaggagagattccaccatgatcatgattatgaggataccaatacgtccgatcgtcagcgacggtgtcccaagcatacagtggtgtttaggacagccttcaacaaatcccagagcactcaactgcgatcccacgacggctctggaaattttgccctacctgagtctgatcatcataaacgagcattgccgggaagctcattgactaatagtccaatgaagtctcatcatggtccgtcacgttcccatctggataccacgcagagcattgcccccaagccgcgtgggacaactcccgccttgccgaatgaacatcccaagcctgcacttaccaaaggctcattcgcgaaatttgcacaaaaggttaagccagctgttcttgaaaaaaatgaggccaaacggccacagggaaagaagccatctatagactcatctgcgccctcgggcattccaagtcttcgtctacctcctaagcctacaaaaggaacagcgtctgtgaaggaagcgacggcgcgagaggtctctagcagacctgatctcaagaagagacaaactgaacctctgaactatcgaccgacaacccctgtcccgaaccggggtttacgaaggtcccccttcccaaactccccccaaagacaatcgtcagagtcgccaacgaaacacgccctatctcacgaaatgcacgcctctggaggctcacgagggggccattttacggtgcgagagaacagccacgagtcgctcctcactcaaaccgacacatttctttcacgccgtagtgctggtatgcgttctggatcgcctgccgcggtccagactcacgttcgcagcagcagctctatgtccataacaagatcagaagcagacgggactttatctgcgaatgataaccgccccggatcgtcagctatgcaccgcagatcccaatcatacacccccagcctgtactccctagcgactgcagggtctgagacgtcactgctgcttgcgcaccggcctcgcaaaagtgcatatgaagacatgaaaaccatacaggcactcaatcgcgatggctttgttccaggtatatttccagagagacacttcgtgcaaaacattcgccggttctcccggttctcctctgcttcatacggctcgaatgcgctcacggtcatgggtgttcctagtggctcgaagaatatacctagtaccaagtcagacagccacgagcatagtgcattctcagagaatgcaggccttccaccctctacgatcctcctatcttcattcgtcgatccagccggtggctcgaatgcagctggtgagacagagacaggcttcccattggtccactatctttctatcgaccatgactccaaagccgtggttctgactttacgaggaacatggggcttcgaggacatcctcacagacatgacctgcgattacgatgacctcgaatggcagggtaaaagctggaaggtgcataaaggcatgcacagctcagccaagcggctcctagagggtggcggtggccgagtcatgatcaccctccgtgcggcactagaagaattccaagattacggtatagttctatgcgggcactcgctcggtggaggagttgcagcccttctcgcaacgatgatttcagaacccaacccctccacaacaggcacatccttcgtaacagcctcataccaacccgctgcccgtccccgcttcttgactgccgatagtaatcccagcatcccgaaccccagcctaccaacctacaccatcccagcaaaccggccaatccatgtctatgcctatggtcccccagccgtgatgtcccccttcctccggcttgccacgcgaggcctaataacaacaatcgtcaatggctccgacatagtccccagcctgtcgctaggcatcctgcacgacatgcacacagcgtcactgtccttcaaagacgatgccacaggcgccaaagcgcacatccgccaacgggtcagcgattctctccgccaaagcatcatacacaaattctacgtcaaccagcctccgctggtcgtcaacgcgggcgatggcgtgggtgaagacgcttgggcttggaaaacgctaaaactactccgggatgagatgcgtgcgccgaaactcatgccgcccggtgaggtttttgtcgttgagacgatgcgagttctgcagcgggatgcgtttacggcgccggagctcggcgtcgatgggtatccgcgtcttgggaggcctgcgactcgcgtgcagattcggtttattcgagatgttgatgcttggtttggtgagttgcgctttgctggtggcatgttgagtgatcataatcctgctcggtatgagactagtcttgctgcgttggtgaggggagttttggatgagtagagcttgaggattctagtatccatgggtttttatgttctattctcatttgggttgatggaaagttggatgttggtcagatatattctcctctttctttggttatttgggattataaggttatgttggtaatgatttgatgatatatagggcatagatagacaagaatgaccatttataagttaacaattaacaattaccttggaattgtgaggctcagccattcttcctgatttgagtagtagccgtcttaccatcccaccattatcatacctagaaaggtatgggggcggtaagacgcagttgatggaccatcgatttatggttaacaaagaacaatgctgtaggcactatgaaagcagctacaggagagaatataagagagaaaatagggaaagaaaagtagttttgatcatagaatatacattgagaatcgtaagtttatagtgtatagaaccgacccatctaaaccaaatgggaatccgataaatagaatcaagaccaagatccagggtatcacggcatcactcgcaacgccaaacaaaagaaatccccacctaacaaaagaaaaaacaccctccaaaaaaagtaaacatgacaaagaatcagaagaatacagagagcaaatccacaaccacttatacaacaagcgcagtaggggcaggaggagggcccgggcgaccagagtggcagccacgctcgtggcgcttcatattgctgcggacagagaaagccttaccgcagccggcgtgtgtgcagcggaagggcttctcgccagtgtgagagtgggagtgaatgcgcagggaagaagggcgcgagaaagccttgtggcaggtacggcagatataccggtcgtggttctgctggtacggggctgaggtggagggcgggaagtagtggtggtgttgccaagccggggtgacgggggagatgagagccgaagacgagtgcgagtgcgagtgctgcgtctggacagtgggcatctggggggctgatactggcgtcgagggctggaaagaggatgtggttggcgggcgggggtagtacattggctgttgaggagcgtcgattggagatgtgtacgatgaaacgcttggcgctggcgaggcgtaaggtgctgtgttgcgcgggatgtggattgagccgttgctagagatagaggaacggtgtaggtgatggtggtacgcttccttgtgagagagcgactctataggagatgcgcgacggtgagcgtgaccagagccggggcgcagaggcggtgttgggggcagctcatatgactggacccggacgtgacggtcaccaagagatggtgagagacgctggcgctctggaaggtatattgattagcgaatgtgctttgaaattgtagtatcgttgaaagtactcactagctgcgtgctgggcaccatcagcaccctcaaagagagatgagattgaaggcaatgagaccttacgctcttcggccggtggcgacattggcggcgagcgcttatagtagctagactcgagaggagtatagatcggcttgacggccgtgctgtgggagaggaggttggcgagatccatgatgaagaagacttgtttgagaagtttgatccggctgcgtttcaaggttggctttattcagtgagtgggggatgccacgaggtttataccagaaagcaggcggacggcttaagatgatcgccagcggacgatgccgactcaggcaaaattccgatttacgttacggcatttttaaattctttttaattctgggattttcataattgtatttccctttattaattctttttcgatgtggtctgctccaaagcttaatttaattgattttatttcttcattatggagtaagtttaataaaaggcatttaaaattcatttaagcgagataaacaattaaaaataattcttttcggagattaacgtgggggggaatgacgatccacccacgcgaaggcagaacccctaaccttccagccttgtgggatgtgcagcgccctaaacccaaattgggaggccgtaaagaccccgttggaggattgcacctcggcttcggttagtgcagatcctgctcgacctgtcacacatcccaagccaccccataaacggctgatcgatcagggatctgttgatctgcgagagcgatgaacggttgtatacagagtagacattgataatagccattctcggtgttttgatctttgaactgggataataaatcataagataggtgccaaacccggggatgacacggttcaggagatcattttctcgcgtggctatggagaaaaacggcgcgagcgaaaagggaaggtcacagagggatagcactagtccattttgggccacatctccggaaccttggaatcatagttacgcctgcgctgcttatacgctggtcaggctactccatacatgatatccatggattgactatgcccggcgtaccggtacggagtactgtagatttaatttaatatattaattaccatctcagctgtgtgatcaccaagggcggctctaagcgctgggggcgagagagaggaatgcctgaaacagttgcacaatccatggccctgggctcgcttacacaaaccttacaggcacagtgagcggagtacatacattgaagtatgtatgtatatgagaaaacttgtttccttcccactctggtgcatgatacatagttagttatagttacaataacccatttagtaattcactctctagtcttggtccaataatggatatatggttggagaatcgaaaatggaaagatcacatcagcaattgaagacctcatacgggaatactccgcctagagtcgaccatgctcctgaagatcattcctcgaagccatggaactgaatcatggctaccagcgaaaacgagttattgacacgatcggcgttctggaacattactcctattaccatgttacctgtgatcatttctagccgtgcacggtttctgcataggagcgattgaggattggccgttagggggtggattcgtcccggcctcgtggaagcgacctccactatttagccttttacagagagcgagatcgccggtgaccgaggtacataataaatatccattacaatacagactgtacaaaataaagcagggaatatagattatacatacgtgtatccattcttattcatcctttccgtctacattccgtatctcacttggcaatccacttaggcaatagcatgcttatatgtgtatctatttattgatcatgtactattctagaatggctcgagcgttaggatcgtcccgggcctacggatgatcaacccccttgtcggcacttggtacggatcgcctattctcaaatgagcctggcgccggtctttgtattccgcgggcattgattgggtcacccttggttcggctcagggtaaatggatatttgacctttcctattcagctgtcaaaaagtcatgtaaatcatagttgggagcgtgccatatatcaatatagggaatacacttctagagctcctcctgagaaacttgacgcgccgacggctttttttgcttttggtgctttttctttttggtcatgaaaccgggaaaagtgtgatccgctcaagtcccatgggagcgattttacgctttgcgcttacgtttggttttgttgattgggttatttttccccctcttctaatgcctctactccgtggggagtactatatcctactatatttatcacgactccgtgcacattctatttttccaacaatcgatagtctggtcaatctcaccgaaagatatcatgttgagggtgatcgagctatcctctttaggtcatagacccgggtaggtagcggattcagccgtgatcgctgatcgtttcttgatcccggggcactgggcccatgccacgcgactgtctcacccctttctttcgggacacacaggcttgtccgggtcgagttaatggtcgcaaatcagtggggctgaacatgtccacgcgaggaacttggatctttgcagatgtgatatcttgtattcatgctcttcacgagttatacgttcaatttgtccactacaaggtactggttgccttgcgaaagggttgacacatggcacttgcatatccatgcgccttttatgtctgctgtatcacatatcacatcgtgtagtgtttcatcgagggaaatccaaaactataattaagattaaatccctccaagcgtcaaccttgacggagttctcaaagtttaagaaagtggtctcaatcttctttcgaacgtatgttctaaaattgtcgtgaattaccccaaatccccttggatgccgaggtcactagaaattctaaactgccaagcctgctacacgccgatctgggattggtagatccgatctcacgcttgtactacttgggaaggtgcctctattggacggtggacgcgccttggcaatgcaagtgccacgcatacaataccttttttttctttttcttctttcctccatttctccatttcacgtggcaacaagccctaatctggcattcagtccgatgcacctgtctgcgtccgatcactaggatatccgcatgggatcttcccgcgacgaagactgcagtagtgcacggagtacatattatatgctatttatgcaggtattggattattgaatcataatccgaacgtgtcgaacgacacacttttcacctttatattcatttccaactggataatatcaatctgcaatcattgcatatatacagcatagaaatatactttgtactactccgtatatagtaagtatatcaacaacataactactccgtaggtagaatacaatatacaatcctgccaactagtatggaataacctccttcctattccgaaacgatcggtggatcaacgaagatcccaactctagggggatacataaccgatggtcatagctcccgctgactcatttcatgatcgcccgccatctctaagcgacgaccgtttagggagtgtctccgatgcggtcctctacgtaataatatgtcgatacatattgttatgcggtgactcgtatttggctcctcagtgctcatgcaacgtactgtggtactaagcacggagtacggagtagatttagattagatacgtacctgatctgatgatgtctgggtcaattcgccatgaactggatttccacgctacggagtaatattttcgatggatgacaccttcgtccgatacctcgacggtgtttgttcatttttcagccccccaaaaaagggaacagcctttctacaccgtagattgtcataagcgtatgaccagccgcacccgaacccgaacactgaaaatcagggggaagaagtaataatagaatgtcaatgctaaaaagcaaaaacgaagaccctgagttacctataatcggatgccaaacgagggatgatcgacagcgatcacctataatatacggagtacatattgaccgtctcaaaagaggcagatccagcgaaagggggcgtgtcgcttccacagagtcgggcctgtgaaaaacaccgaataagaaagcagggctacggtacaatcctaccgaaatctgctagtcccagctaggtggacggagtgtagccggaacgagtgttaggcgagggacggttagaacccggtatgtctgaactgtatgaaacaacgacctgttcgtcgtggccgatcataaaaatctagcgagattaccggcgtcttaccggggtaccatttcccgcctcggtacaatccccgtgtaggatcggccgtggggccatcgggctacactcctcatgttgtctaggcgaactgaccatgtcgtaggttccataattttgcctccaaaaaaaaccccccgagaacatggaggtgatacccgacctatcgtcatagttgtagatcctacggagttgtgctcctgtttatttcccctttcgcgcccgttctcagcgcatcggtagatcgggaccactttgaccccctccgtgtctctgctacggtcctatatagttactagtatgtatctggatatctgcgatctgcactccgttcgctccactggagctatgaaacacctgatcaacttccctgcgctagacccatcagccatatccgaatgaagccatacacccgcgcatagtcttcggaattgtctgatagttcttgatagtcgcttttatgaacgacatatctattgcttcggtacggagtattcacctatattgtactgagtacggagtactccgtacaacatacatcgatggacggagtgcatactccatggcctgcaaaagaataaagttcatctttgattactttgattaaggtcctgcctatttcggcatccaacttccaagtcttccttttatttagctttctgtttttccactctgatccgtcgggtttggtttcgggtctttgttcggaaggattcattgtcgcaaccgttgagatcagattccaacccggtgactcaagattatgtgattactcgggatccactcgccgaggattgcttacacattaccaaccacacaccgagcacactacgtatgcaagtacggagtatgcaagcaactaattcggacatactccgtaatccataacagcggggaggagtggacacgagtctgatcatgcccagccttccgtattccaggcacacgacgatagtgacatatacatacgagaccaatgcccgttgtattgatcgcttactgggatgcaatgccactgtaatgccattgaaacaagaattcagcgcctacattacctttgcatggtgcatacttgtaactaactagtcatatagagtttgttactatttggtcgcatagaaggcaatcccctaataatcctctgtcggagaggcaatttcagtgtgaaccttgtacaacatagaacgtacgttgcacgttgtaatggtgtgcacgctaatggtagatcctgggtgatcgaccgtgtgattttcacggtcctgttgtttcatgtcggcaattgcttcttcatgtgcggggattgggtaggaaaggcgtatgcgttgagctcattattatgaaagcattaccccgtacgccattggattggtagagatgtctttcggttactataatggtactccgtagattatactaccgttgcattctaggcttttacttcgggggggtgggcgcctgggacctgctggcttatagatccttgtacctactagttcacctcgccacaccgtggtccgttgggtccacatatgcatttaggtggcatgtattattggataaaggatggcttgggtcccgtcttcttggtattggttatcctgcgccgcattacaggcggatcggagtcctgctcaagtaggacaagtacgagtggaaagggtttgcttcgtacatcctctattattatatgtagtcacaaggtacaaggtacatgctctcaataataagtgcaggctgcataagcagtctgcaatgatatacaaccattcaagtcaccaggccgcccagatctgaatatgccgggtgtggccgagattgtgtgacgcttgaacactggctctcgtgacatattacattgacaatatatgggctattcaactaggttgcggtgtttctttgtcttcgaccccaacggagtactccggtactccgtggtgagacctcaagccacgttattgggggccgttgaaaaggatcaagcagcagagtgaccaatgcgctgatctgagtctgcggaccgtgcatggctcccagcgctatgatgcatcacttggcttagtattgaaacatgacgtatcgtctttgtaggtaagaagaagagaagtgacttcactacggagtagataggggtttccaaccttcaagttggaatagaaataagaggttcgttttgcgaggtggggaaatgtccgcaagtgatcccaactaggtaaagagaaagagaggatataatacacatacaaatatcaagagcgtctttacaatgcatcgtagaatatcgagccaacggaccaaaaagcagcgtcgatcagccccgtgcggtatatgcatggccatctcgataggggatgggctagagatgagacaagaagagtacagttgaaatcaaaggagacaaagagcaaattagagttgatcttagcgaaaaggatgttaatgccgacaggtcattggtgtgcaatcctccggtgatcgaccgaaatgtcgatctgagctctcttctttactgcaagcgatctatttctctttcggtcgaatggtccgatccgagcatgagaatgcttttcgaactttctaggccaaggaagaaccaagagaaaatcgtaaacggttgtatttgacccctttggccttggagcaagttcgtcctttactgcggctcccttttggccccgtatgcatgatcggccactccgtgtctgtgcgagtgcttggtccacgtctgtttccaggatctttagtctgatcgtcatatcttctgacatttcgtcgagcacaatatgctgatagagtataaaaccattgctcgtggttacatcgaaaatatgctccttgttcttagaaattagaaatctacatactctggacaatagagcccttccgaggttcgaccgacagattggctaaatggggtaataggataaattggtaaattggtaaattgggtatcgcaaactgagcataaactaaaaacctcaagaacttcgttaggcatagacgtccacttgaccattgctttgcatgggttcagatgggccactggtgatcgctctggcggccaccttcctcatgttctcaattgccttcttgaagttggccttgtcataatcttcgggcatatgctctccactatagatgcaaagcacgcgcatacccggcttgtaagagagttgttcaagcagcttaggtgtaatgaggaagtactggccgcccccgccaccgccgatggggttgccgccttcgtcggtttcttcggtttcgtccgaggcacaggcaatgtccaccaggcgtccgtgaaccatgcgctcgtttcgcgggtccataccttgattgatctcatccacaacgcggaatggcgaggcggagagcgactgcagtgccatgagatagaagatggtactcaccgctcgttcaccaccggactggcgatgtgaatccaagactgacagccccgcgccctgacggaactggacgtgaatcacgatcgaccactccccgaattcgctagcaccaggctcgccattgggcccagcttcaccttccgctttgcccaaggtgacctggccagcacatccaatgcggcggaaagaatccgagaaggcatcgctaatcttctcgatgagcgcttccaacctaggctcccagtccttgcggatgtccgtgatggcgttgtcaatttccgtaagcttgttcatgaaatcggcgagtttggagcgcaacttctcaatggattttccacggtcttcgaattctttgatcatctggctactaccaccatgggtgagttctagtcgggccttctcagagtcaatgtcggcttcgagcttatctatgtcatgatcgttgagttcttcaagtagagattgcgcgtcgggttggtcgtgcagttctcggctgatttgctgagctttttggaaaactgctctggccttcactttggattcccttaatttgactgtagcctcctgcgcctgtcgtctctttgtttctagtaacttcgtactatcaatgttgcgatgccgcagggtctgaaggtcggaagttgcctccaggaataggacctcgactttcatgagctcctcatgagcttgacggaacaattcgacagcatcctgcattccgtcagatacggtagatagaaatgtcagtgatgaacttacggcatattcgacagcgacctcggccttttgaattgccaattcgtcttgctggttgcgaaattcacgaactctctcccgtaccccatcaaacatggctgtaatgttttggagtttggcctcttgttgagctgcaagcagttagacaaatcccagacggcagaagaacaagaaacgaaacatacatattttctctgggattgctcggtactgagtgtgagccgtctgttttgcgctcttttctttctcgatgtctgtctgtagtacgattagtatatcgtgtgacgaaaacaagaggactatgcggaataccatttctcgctcggtctgctcgtgttcttcgcttatttttttcacggcagccctttcggactcgagcttctccttgatgtcctgcagctgttcattccataacgtgatgttctcttggtgttcacgtttaagggaaacatcaacaggctgttcggtccacacctgagcaggcttgatctctcgaacccgagttgatgtggcaccaggtccatactctctacgccgagtcacttgatagctttttttcccagatacccaggagctcattgaaccctcctccaagcgggcaaaaacttcatttgaaatttcacgcagtccgataggagtcaagtgtaggctcttctcactgcacagcatggcaatgacaggatcgggcccgaccagaaaatcccttgcccaaccatcgaatcccaattgggcaagttgatcattcgtcattggaggcctcatagtatccaacgacagcgagcaggtgcggatgctaatgtcatggagtcccaatgtttggttaatcgcaaattgcaaggtgcgaaaatcattcctggtctgtacggtgaacgacgtgaagtctgtcttctggaataaagactcgacagcatcggcaaatttggggtcggtgattgagcacgtaacgattggagggccgaagacttctttttcaaacttgctttggttttcaagaagccatctataggctttcaacgtatcgttggaagatttctgcaacttgagttcttgttggccggaggctgaatccaagctgcttagctggagttcggcctgcttgatactcctttgcacttgctgttgctgctcctggagtggctgtctcctatcttggatttctctggcctttgcctcaagctcgcgtttttcgcgccgtttctctctctaatgttgtgataagtatgctggtccaaatcggaagacatagggttcttaccaaggtctcgttgtagaattccgggtcgaactccacggcctcctcttcttgttggcgtcgaagtctatggatagcttgctgagcagatgctgcttcggacttgtgcctctgaccactctttttttcggcctcaatccgacctttgagatccttcatcctattctcaaattcatcgattttttggccgcgttgagtggcgaccctagatgcctcgtcaacagaatcctttcgatcatctttcacaacgttcaatcgtgcgatataggcctctttggcgttgactgcacgcaagataggctcgttttctgcctgaatccgatgatattcacgctcagctacagctttggtaaccttcagggcctcgacagcattgtggtgttccttgtactcgacaattggacggcaacgctcaaggatttcgattttccgcttgatcacagctctctgacgcattctttcaacgtcggctctctgcatctcttggcgattctccatattttctagcaattccttgtcaccactgttgtccatctcgagtttcttctgctcagctctcagtctcttcaaggcatcatgccattgggtcatttccggaccagctgctgctcgttgcgtggaatgaagaagctcaatcggtgtaagtgcagcaaactcggcgactttatcctgaggaagaaactggcagagattgtctacctggatggcgaaggactgagccagtttcaacacatcgttcttggaagcgggtgctccgttgagtgtaaatgagcttttattgccatcgcgcttgatgagtcgctggatgacagggttgtgaccaatcttgggcggtccgcatagttcaatctcaatcgtagcctctcgggccccatgcttcacaaactcgcctagttccttggcgcgtccaaggtgctaaagatcaggtgagtatcagtatagggaggctgtgcagtattatagtccgggtcttacctgaggtccccaccccaggcctaagcagatggcacagaccagggtgcttttgcccgttccatttggaccaatgaccatgttgagctttggtccaggataaaacactgctgatgtataagtcacaaagtttgtcaccttaatccgcacgatcgcgcccggcttataaccaccgggaccaagaccatcgtgggctgtcgcacgcgggacctgagaaactgcttccggtatttcagatccagcactatccccatccctctctcgttccccttcgccttcgctctcgtctccagagtctgatccgctatcgctttcagcaaggtccaagcggggacgtttgttgttcgagggttgggcttggggagtaaacgtaaagtcttcgtcttcttcatcctcactgtgaggtcgacgacgaggaatactgggtgatgccatgcttgttggaaccctcaaatagatgtagagggagcctcatgggctgtctgtgaaattcgctttgtctggctgttctttgttcaagtccgacgcgaggaacgcgtccgcgatcaataaagtccgattagtaggcggtgagagcctcgaaatggccaattggttgcagccaaaacagcttcgactttgtatagcactcaccatgcctcctccgaatatcaagcggttgatcttaactactgcagttgtttctatcactatcacgggtactctttatggcgctcgtctcaaaactgatcaagaaattgctgaggtatgagcgaatccgcctagatcgaatttatccatttacctgcagcatttcagatctaacaatgatgcgacatagacagtaaagcaacgacaacaatcgacgtttgatgagcaaaccaaagctctccaggatatgcgctccaacctgattgctcggagaggcataattgagaaccagatacgagacctggatgcaaggatgctagagaagcagcagaaaggcatcagtggtgatgctcaagatcaaccgagtggaggtcgatgagcctatgaagtaattgcccaacggaggcaacggattcacaactaccgttcaacgcgaaccaacccacgatgcaaccggcatgctttgagtctccgaaggaccgggcaccacttgcgattcaaatacaaggtggcggctatcgactacatagttccaacataggtcttaacacccactagctgcgcagcaaactttctactaggcctgttgcacttgtttttgatcttcgagtcccacaatccaaccatggcctgcaaagtctggaaacattggacttgcttcgattgatggatttgactgcttgtacataacttggggtgctattcaaatcaactattacttcttttgtttataaacaagaatatatattttttcctctggcccgaagtgctaaagattctactagagggctggatgtatatttagcatctttcatttcccagacactgtagctttaatctctaatccagagcccctggatatgtaaaccggcctggaagccacttgaatagtgcgatgaaatcaggagacgccgttggtcgactaatttggaagctagtggcgagaccccagacgcctaagcctcgaggttcagtctttccagcaaatcatccagcttttcgagcaagatctcatagttcatcgcatcttccgagaattcatcctcaacaaccgcgccgtcgagagttcgaatctccggggcatggacttgtagctgctggccttgattggggatagcctccttggaaacattcagggtctgtacaccttctgtaagatctaaaatatcttccagcggctcgtcttcgtctagatcttccggtacttctttttcttccatcatctcattcagaccagcctcaccaaatctcaatctaaaccgctctccaagatagaaccggatatcatccagcatttcaatggaatcggtttcctgtctcgccttgatacgagatgctgattcctggatcaactccgcaaattctggcctatctatatgggcttccagtcgatatgcgagatatcgagcagcgaactcttccaatctctgcacgcgcgtcaaccacgccgctcgaacgattaagtaaatgtcaatgtcatcttcttccgcgcctcctcgagttttcgcagcctccgcctgggacatcccagcactaccgagggtgctgatgaccatggcggctttcgtcttcagcttctcaatgaagagcatgtctgcggcgaataggacgtcgacagcgatttctaaggggaaatcggctctttcggtgtataggaatgtaagaataatttccaagacttcaggcgaacagttgacgtcgatgatcgtcagatgctcattgaggtaagcttcgcgaaaagtggatgtaaacattgcctggaaaaactcagaccgcaaaagcattgctcgatggcatgggaagatgatcgatttcggcgcctcgaggttgttctcattcgcggtagagatagcgccaatagcaatcgaactggatgtgccatttctgacctctgatgtgtcaatgtcctcttcctcctcatcatcggggagttcatccgctctcagaagaacatcagcgaagattgcattgcttcgatcccacttcacttcatccaccttcgaagtctccacctcgagcttgttccccagaatattctcctggaaccattgttccatttgatctcggcccttggaaatatcgtcggttcttctttgtctagcacgtcttctgtctccactatcaaggatactgtctagaagactaggtatctccaaatacttggaaattctatccagcgctgcaaaagtctcggactccatgaagcctgtccctggtccacttcgcaagtcccgaggagcttctccaaagtacagatatttgatagccgcaccgaatgcctccggtgaaatggtgctggggagattccatgttgcagattctggtgccacggccagtttaccatggaagtatggagagcgtgccgcgaggatgaatttgtggaggtggagcgattcgtcggatgccgtcacaacaatatctgttgttaatggagattcacgggtaagaagtgtagttatatgcgcggctagcggctggagggggtccgtggacttggaataatcatattccagaaggagatttcgtatccggtcgtttaaagcattatagagacatctatagaaccaccattgttaattctagccacttcatagagaatcaattgctatttacctctcaccctgaaatgtgtctcgctcacaaagtgcaccagactcgagaagaagttgcgcaacctcataatgaccacagagactcgcctaccaggttcattgattattatgcgatacacgggattggcacggtcaaattatcaatatattgtactcaccagaatcaatggcgtataatcatagggatcacgagcattaacattgacgccctcggtgattttctcctggcagactttcagatcgccctgacggcatgcgctgcatagttcacagaatggcgcactgagatctaaagggttatcatccttaatagtgccctccttaatcaattccttctcattgactaagctgatctctagctggtccttccgcagcacagttggctcatccatcatgcagattgccaggaacaacaggtcgaagtgggatgaggccgagggcaaactgcaacggcgggggcggaaactggcttatcgataagaatcacgtgattgtacaactgtgaagtctgagattaagggggtgtcctatattgtagagatatttggaagagtaagtagtgactagaatggttaaagtatgaatcaatgtatatacatagatatagatattcaagtatacatcacaacaagaactgtaataatcataattggttaaacaccattcgcctccttccgaccgtttgatcgacctcccctaccgcctgctgggttggggaaagcgccataatcaccgttgcatagcaacgatcccccaaacacccgtcttcaaagctccaattcatattgccttgactcttcctcaaatcttcaactctacagctagacttttttttactaacacaggatcttgttttataccgttcatgcatcattgaccctcattcttctgtttcgccttcacctcaacgtcctaaaccaactctacagcaatctatagccatggcgattgctttggctgaggccgataagtatgagatcttggacaaaattggtaagttctacctttttgtgacctaatttgtatcctacgtgctcaaaactaatctcatattcattcaggttgcggttccttcggaatcattcgcaaagtcaagcggaagtcagatggatttgtaagtgtgcatagttggcgtgttgcaaccagaactaacctcaaattgctcctatagattctttgccgcaaggaaatcaactacatcaaaatgtctcagaaagaacgcgaacaactcactgccgagttcaacattttgagttcccttcgtcacccaaacatcgtcgcatactaccaccgggaacatctcaaggccagccaggatctgtacctttacatggaatattgtggtggcggagatctaggcatggtcatcaagaacttgaagaaggccaacaaatacgccgaagaggagtttgtctggcgcattctctcccagcttgtcactgctttattccggtgtcactacggatctgatcccgccgaggtcggatcaaatattctgggcccggctcccaagccatctggactcaagggaaaacaggggcaagtcactattttacatcgcgacctgaagccggagaacatcttcctcggtagcgacaacaccgtcaagcttggagatttcggcttgtccaaacaaatgcaatcccacgacttcgcatcgacttatgttggcacacctttctacatgtcaccggaaatctgcgcagctgaaaaatacaccctgcgctccgacatttgggcggtcggctgcatcatgtacgagctgtgccagaaggaaccccctttcaacgctcgtacccacatccaactagttcaaaaaattcgcgagggaaagttcgcccccttgcctgattactattccccagagctcaagaacgttattggaagctgtctgcgggtcaatcccgatcaccgccctgacacatctgctctgattcaccttcctatcattcgcttgatgcgcaaggagaaagaggttgttgacctcggaaagaccctgcgccgacgtgaggaggttgctgtccataaagtccgtgaaatggaacagaacctcgccaagagagaatcagaaaagcaacacatcaaggctgaaatcgaaaatacggttcgacgagagtgggaggtcaaagcacgcttagaaatcgatcgccaggtgcaaagcgaacttgacagactccgcaagcgatttgagtctgaagtgcaagaaagggtcgccattgaggttaagaagtacaagcacaacacctccaatagcaatacctcccgggacgatgtgtttcgcacgagtaccaatggctctgggtcctctcgatccagcaatcaaggttggcggtcttctcggtcttctgccaacacgacagacgacagcgatactaccccctcatcaaacgccgacatcagccagctatctcttggctctcctccatcaaatacccgaaagcagcccaagaaggagacgcgaacacctttttgtcggtccaagaccgttgttgattcaccggtggatgttcaaatggccgagccgtcacctatttcaatcgcttcgctttccctatcccctcgccgcacttccgcccaaggaggcgctcgcaacatctttgcagaggccgagcggaccaaggctaagtgggagcccaccctagcctattctgatgatgatgacgacacccccgacttgccctcaccaactcggcctaaggtgaagcccgacccattgaaggcgccacgacgacctctacttcgccagaacaccgcggctctcatgcagaaacttagcacgcaaccttctctcttcccttccggcggtacccgtcttcctcaatcgacgagtgcatctgcttcccagtctgaggagcgcagtgtaagtgagagcagggctaggtctccccaccgccgtctaactaaaatcccatcatctgccaacctcgctgccgatgcgggtacctcaccaacccgcaagagtgcatcgaagcagcaacctccttctactaagaacgggggtggtggcgaagagatgttcaaggctgttatgcaacgcaacatgggtggccgtaccctcgtcgaactcgcacaggcgagagctggaggccgtccgatggatgaagtcaagcgttgtgccagtgactcgcgcgctggcggccccaccatgagcgtgaaatgctctgaacgtgatgctcctgctatctggaaccctgaactggatgagatgcccagtcccttccttgcccgtggcaggaaagttatccgcaacctgcggtagtcttttacttacattaaatctcctttacatttacactgttctttcggtttggttctggtttcggctctcttatgacgccttggggtattggagttttttttggattgaaggtttttctttcttggatttggatttcgatggtttggtttctttgctttggtttctttggtttctttggaagcccctttttgcccaccgttttcggttttcgcacttcgcttcttgcgcatactttcccattatgtcacggagttggcactaatgttttcggagcatccttgccatgcaaggcacggagtttgatacatatgcccatgtctctttgcattcgttggctacacacttgcctccccgactcgactctttaccacttttcttttgttgtttatgccgtcatgcccctttccttcaaaaaaggagacgattgagttctcttgtacatttattgcgttagccatgcatcgactgtcgaatttctgtacttgtttcctgtttctctgaacgtctcatctattactcgtggtgtcctcctccttcgcacacatgttgcttagtggttatattggactaatatttgctatgcctcccactcgggagtacttcacctaattcttcttcggaaagattacatattccgggttctggtgctttcgatgcttcaatgggggatgtacatatccatttcagaagaagtaaacatgtttcgtgtcattccagacttataacagccccgcagaagtttatgctgacttcctaaatgtgggagtcgagtcatccatctacagcgttagccctaccctaatatgcatcaccagtacactttaccactctttcaaactactagatgcatagaataggtaaatctgcacatctgattgaaatctgcaacataatacgtgaatgatgttcaatgaaacattttgaccaaaagatcagattaagcccacgcctcctcatcttcgatctcttctatctgaacagacttactctcctggttaagacgccgctcctcttcttctaacgccaacatccaatcctcctgtggtgaatcgccagcttgtgcttccggaacggggccggcatgatacccagccttctcaagcttgtccaactcttcaggttctaacaacttcccctgtcccttgattgactgctgtttcattctgaccgcagccggaacaaacttcctagttgcctcttgtcgcaggtcccgaatctgaggcttcgcttcgtaaacggtccttgctgctggaaccgccgttggacgagatggcagtgggtgaggaccactacgctcaacgttctgttctgaaggcacatttccatcccatctgcgctggtgctggcgtgggattggtggcggtgtatcccgcggcatgggtatccttcgcacgtcctcatccgtatcgctggtgtcactatcacgaggcattcgtgtttcatttgagcctcgccttctcttcccaagcacgccgtcaccaccaccccgtctagaactatcaccctggcggcctcctctgccgccgtgatcgaactggggtgccttgtcgccaagagcttcgcgcgccttcaaaacgccccgcaaatccttttctagcgcttcgagaagctccttatcgcgcggccgtagtttttgccctgattcctcggcttctttgaagctgttgatctgacgttgaattcgatctgggttgcggcgcgcaagtttctcgtttcggcgggctagtgcctctgatttgcctttcttcaactctttttgtttatcctgtttccgttgcgctgcggcagggttgatcgagcgctctttgtctttggccatgacgtcgtgttggtgttggtgtgtgagtggtctgtaattatcggtatggcgtaagctagctgcgcaagcgggtaataaatgccacggactcttggcgaatcaattgaagagatcgcagattaggtaccggcacaaacgtctgggctctgtggggtgtcgcacgtgaagggtatagttggaaacaagaatgcagggcgcagactagaaaagaaagcgcgcaatgaggatggccagtgtgtctatcccgcagaataacaggcgatcagtgcgttaggtcgcctcgtctagatcgatcgcgtcgggccgtcaggtcgatagtccgagactacaggtgggtgatgctcacaggccgaatgtaagaaaggctacgaacaagcggtgtgtcaaataaaatcaccagttttagcttcacggtttgagcagctaaggttggctgtgatagtagcggctgagtaaagaagttaaagttgaagttgggacttggtcaagtaccagtcctagataattttggcagaaatccaacatgcacagcggaaaagaaagcggtgtattttaggaccaatcatggaagttaaatctcatctggtcgctgtggttctccgtagagaaactaaagagtggagagagagagctaccatggttcagcattattgaactacgactacatacattgtacatacatcgtacattttacatctatgttgatttatatataatcaatgttatcattgcatatatagagatgtatatcattgcccattgctctcgattctcttatattcctggtgggcattaatgtacggagtagagcctcttgaaacttccatctcaatgagataggtgcagagcctatgcaatattcaatatcaaagaaaaaaaaaacatcgaagaagtacttgaggatgaaacaaaagaaaactctgaaaatatcaatacaataaatacataggctgctaaaaattactttttcttgatgttcgttccatctccaagcccctctttatggggaagtccgaggtatcatatttccgcctgagcctgtgctccaaaacatgcatatgtataaaagagaaatctcactagtctcttcgtcgggagtgtaactggcttccctcgagccgcgcgctgtctgttgagttgccgccaaccttccagcggctcacaccttctttctccgcctctctttttcctttttgatttctcctcataggagaaaaaagaagcttctctcccctcctcagccgtcaatagtcgcattccccggcctgactgcagtatatcgcaaactctcctctttacactctccatcctccatcatgacctgtggtccgtttggtctcacatcgagtttgatcggcgcctcgtagactgtcgcggtcggagcatgtctctgccgggaccaaatgtccgtctcagcctcgattcccgacacttcgcttggtctcacctcctccgagatccagatcctccgacaacagcagcagattgccttgcagggcggccatgccggcaatggggtggccaggggaagaggcactggaaggaccagcaattccagctcgcgcgcaaccagcgctgccagcagccagggtcgcttgctgctagaccctatgagcctccgcgcactatcgcaccagctggatggattgcaggcgcagatcagtcaccggatcgaatatgtatgtttcctcctcggtccttgaccgcatgtccatatcatcgggaaatcacatttcgttgttttaacataggacatccttgctagctcgaggatcaaatgcagcgctccatccaaaacacctacgaccgcgcgggaaacgtcattcgaaatgccgatgcggaaattgcccgcacccgtgaaatcttggcctctatcgacgagttagacaatgagctagcgaagatcgcccatatccgtgatattgtcaagtcattccgtggccggatcgagaatctagatcaccgcattgatcagagttctcggcgccgacgataatgccttcccataaacactctctccaaatacttccttcaaccccacctatcttgaagcgctccgaaagaccatgtacggtcctgcgctccgcacaactcacttttactcgaccactggatggtccgaccgatacacacctatattttcttcacacaagtatccgaaccagaacacatcaaagccgacagaacaagaaacaacagactatatatcgaatgtgtcctcatgaaccctttttttaatgcgcgtcaatcaccgtattcatatatatgtcacatttcattactctgggtatctgcttgatgaaacaattggctgaaagaactgcatgcctatgttgtagagacaccagtgttgagcaggcgacctcgaacggactgcagtatcttcatgactgcttgagctgcgtcgatgacggccatgagaactcggttcccacccggtgggaatccatgagatctgatgactatcatgaagggttttgaatgtgatttaaagcgcataagcacaacttgtcttatgcgtctccttgtttgatttgatgcttctgctatttcccctgttgcttcgattcccctctctgcatgttgcgtgtacattgctccgggttttctttttctgcgttgaggttggcccatgtccattgctaggatgattatagcttggcttgtggtgttctgcaatataattgggaacagtttcttcaaaacgattgaatcgtacgtcgctctgcgttgagtcctccaaggttgacatggacattgaaatgtcagggtctcgatttgaatagcaagcaggtcgtcggtgcagtcgctagagatatattgaggctactcaagggggttgagacttcttccggcgatgatggtggaaatcattgccctggtttgatggacatccctggcgatcgtagctgagatctcattgtaaaagccgacacaaagcaagttcgatgggctcctgcagagcgccttgatcatgtagttgatatagcaaaagggagcgcgctggcctgctgacacgcacaccttgaaagtgtggccgcattggtttcgggttttgtaggacagggtgtaagattcaatacattaaagtggcccacgcgttgaccccccacgcgtagtcactggatttggcgagtgctattcacgttattcagacaccgcagcatccaacattggcacattctgttcacataattcgactgctgctccttgcgacgacgcggaggtatctactttttgtgaattcacatcgcgtagcaaggccgagtccttctcctggcggcgttcaacgagctttttcccacgtttctccgtctgagggaatcgtttttctgtcccgcacaagaggcaccggacgaccagtacatcggcccatggcttcttgccgccacgacttgcgtttctgatttcatgcgagcaagtcacctccggcgtcaatattgtatcacagcgcttgcaaaccgatctcttcagtgtgaccggcaaccgaatctgcgtcttcattgccacggcgcgtagatgtgatacacatacccttgagaggtttcccaatagctcttgttgttgagtatctaatgtgtggccattatcccctgagtcaacatgaccagcaacagaggtgtgttcattgttgtggactttgacgttctgacccttggcgagtgtagatttgctctggaaatatgcggcggcttggtgtaggtaatccagccgtgctcgaatatggctctgagtgttcttgaaattcttgacttccttctttcccttggctttagccattctcgaacattcaacagagcaacaagtggatctcaaaattgtgtgctgcaacctgcacttcgagaagagcttcccatcgacgctagacccaaagcggtgaggctgaataaccacgtgatgctcccttggtgaggtcttcgtcctaccgccttatgacttcttcccctacacctttgtctatcgagacctgccacattcccgcggtccatacgtcttctccttattacctttgtctactttcacttcaaccacacgtcatctctcactcgcaatactttttcctcttcttatcaaaactcgcctacttacgtcgccatgtctcacgaggaagatcttatcgactactctgatgaggagcttcagaccaccacagcaccggccaccactgctgcgcctgccgccacgaatggcgatgccgacaagcagggcgacttgactgtaaccggcggccgtcccgacaagaagggcagctatgtcggtattcactctaccggtttccgcgacttcctgctgaagggtgaacttctgcgcgccatcaccgactgcggcttcgaacatccatcggagggttagtctaactcattattcccacaagcgttcctccatttgtccaatctccaacgtccgtccatcctcgcgggaggaatcttctgtcggtatttggcaatcagtcgtgtttcgaatctgcaggcgacatgaggattattgctcctgaaaaaggacaatatgtctttacaatatatatacgtttggtcctgtggcgctcttgcgctaagcctgagcctatgttcccaactctcacgtacttcgtggagattggcgcacgcggtggaagactgtgatatttatcacgtttgcctccttgtgaggcgcacctcatgttgtctgcagaatatgataggatgtgcacaaaaagcctggcttttaagtgttacatatagtcatggtggtttgatcaagcggcggaagatgaccgcctgcatcaatttgatgttgtcgggggatggacggacattgcgagacgactatttttttttgcttcttctttcgtcgaacccaatctaacatcggctccgccttccaacagtccagcaagtttgcattccgacttccattttgaacgtcgatgttctttgccaggccaagtccggtctcggtaagaccgcagtcttcgttctcaccacccttcaccaattggagcccgttcctggcgagtgccagatcctggtcatgtgccatacccgtgaactcgcttatcagatcaagaacgagtacgcccgtttctctaagtacttgcccgacgttaagactgcggtgttctacggtggtaccccgatccagaaagatgtcgaaatcttgtccaacaaggaaacctaccccaacattgtggtcgccactcccggtcgtctgaatgcgctggtccgtgacaagaaattgtccctgcgcaacgtgaaggcctttgttctcgacgagtgtgacaagatgcttgaccagattggtatgtgcatgcgatatacgacttgactatcacatcttactaacattcttccccagacatgcgccgtgatgtccaggaaatcttccgtgcaacccccgccgacaagcaggtcatgatgttcagtgccaccctttcccaggagattcgtcccatctgcaagaagttcatgcgcaacccgctggaggtctatgtcgatgatgataccaagctcaccctccatggcttgcaacagtactacatcaagcttgacgagaaggagaagaatcgcaagctgaatgagcttttggacaacctcgagttcaaccaggtcatcatcttcgtcaagagcacccagcgtgccaacgagctggacaagctgttgcgcgagtgcaacttccccagtatcgcagtccactctggtgttagccaggaggagcggtaagttcatccgagttcggcattggctgcagcaatttgctgacctccatctagtatcaagcgctacaaggagttcaaggagttcaacaagcgcatctgtgttgccactgatgtcttcggccgtggtattgatatcgagcgcatcaacctcgccatcaactacgatctccccgccgacgctgactcttacctgcaccgtgttggtcgtgccggtcgcttcggtaccaagggtctttctatctccttcgtcagcagtgaggaggacgagaaggtcctgaaggagattgagaagcgctttgaggttgcccttccgtaagtttctccaattccaaactaaaatgctttttggcaaaaggctaattatatccacagcgagtaccccgaggcaggtgttgactccaccacctacatggcttaggcatgtctcggtaaaaactttgttgatttgaaatttcttttcctctttccaattgttatggcgcactagctcgggttttgatatgtttttctccgccgttgggcgctgcctctgccccccaccccttgtggctttgaagtgaggcataacccttccatgtatccgagaacagcaatggaagcaagaatgggttagctctgcacgactgtttaaccgtatcctggccgtatcctgacgggaattctgggatcacaatgtggagttgcgatgtcatagttatcgacgtctgcaagacaagtcaaagccgaagacaatcagatagaaatatgcgccgccctgcggtcgtgattccgaccagacgacccgaagaccctgctaagtttccgatcgagccggagtggatatagacaccagaattcaatatctcaactatgttcctcgtggtttgcccttaactgtcggaaccggtccacccataactctagggcgcaataattagcctccactataccatgtatctagaagctggatgtatgtagtcggtggttgcagttccaatctgacttaaagagcttcgtagcagctttggtcatcctttacccgatccttgtatgagcgatgtgattttgactgattcgacgcatcatactgatctgagcgagatatgtgtgctgtttaggatatctaccactcaaagtcaatacagcgagggtattcaatgctgcgacatatcagtatcttctggtcaaaattagaaaataaagagttcctgcatgctatcatgacaactgtcgagttgaacacacggcgaagaaattgggacattcgtgagtcgagtagcaagatacatataactaatatgaatgtagatagatcttagtagaattggcaaaactcgagattttctacatggaagtactcagtgctttgtatatatctctgcgagttagaagtaaacatacggttgaccgtccaacacagaaagtatcaagcataaccaaagcccatgacctggaatataatacagttacataatgcattaccctgtttgaggcgaaaatcaaagtgaaaacacgaaaaatggcttagcccaaagcactagcagctggaaaggcatcgggtagcgtatcaggaaaataaggcagagacatcaaaccctgtcccgaattttcaggtaaatggccgtcggccctctcacttcagcgtcggctgtttgtgagtgcagagtctgcgttcgcgtgatttgaatccgtaactaagcagatataatatagaaatgattgtactctgtactattacttagatcaagaccacgttgcgtaatacataataatttagctggcctcaatggattgacaatgcaaatcactgaatctgcaatgcatcaaggactgacgtgcccggaagtgcaaggaagagtcgggatggcatcaccgcatccgcgtctccgagcccggttcaaacacaacaaatgccatggcgtgatcaattccgtcagctcactacagagccctggagctccgagggaaatatctatgggccctacaacgtacggagtactcggtatgttgtacggagtactctatagttaagtaccagctaatactaagatactagtgattccaacacgttatataaagtagctctacatcgtctcctttccctaggatcattatggttaatatgcttgattaacggctacccccggggggggggggggggggttannnnnnnnnnnnnnnnnnnnnnnnnnnnnnnnnnnnnnnnnnnnnnnnnnnnnnnnnnnnnnnnnnnnnnnnnnnnnnnnnnnnnnnnnnnnnnnnnnnnnnnnnnnnnnnnnnnnnnnnnnnnnnnnnnnnnnnnnnnnnnnnnnnnnnnnnnnnnnnnnnnnnnnnnnnnnnnnnnnnnnnnnnnnnnnnnnnnnnnnnnnnnnnnnnnnnnnnnnnnnnnnnnnnnnnnnnnnnnnnnnnnnnnnnnnnnnnnnnnnnnnnnnnnnnnnnnnnnnnnnnnnnnnnnnnnccggggggggggggttggtatacgaagacaaatatttaggtttaaaaggacccgattgggtaaaaagggtactaaaccagctgctaagaagctatttttaattatctgcgatttaaaagttttaattcgtgcagaggggtatgctttgaggaagtcatctttattaatatggttgatcccagcctgtattttcattttaatcaaccggctgtacgaccgctttactaccgcaaaataaccgatattaagtggttataaaaggtgagataaatgcagtggtatataaattagtataatttcattttacttataaatcttatcgaattttagggttaaatggcttccgtgaccattgagtactagaagccgataccgatcctttaaccgcggaaaagtcgatagaataaagagcttttaaagctagcgaagtctaattttattagaagtccagccatttagactaactttaaaacgccagtcatttggaaggttattaaaccaagattctatatagaccttacctttgaaaataatatacagaaggagggcctaccccgccgcgtttatatattcaattgcagttacccactcgcaatttctgggttataaaagtgatctctgaccgtagtattcacttctagtaataacctttgccgttacggttaaacctattgcaaaaccggtctcgtcgaagttataaatattatctaggtcaattctaaattaaataatggttttttgaataagattaaaccattctccaataattttcgggtcttcatattttacacgttcgtaattatagtatcttgagaatcgggaggaaagaagaggataccatttaataaattctgtaacccagtttttaccaactgaaagagccggggtagatccacgttatttgaggagaagattcgccatttctcggaccatagaaggccggggggcccctccacgagaatctatagagattatccatttctcaagcgattcttcctcagtttctgtcaatttatgaccattggcgcgagtttcggcgcgaaaggggcccaatggactctcgcgtcatactacgatattggtcacggatgtgtcggccttgaggccctccgaagtagacggtcaactccttgggatcattccgcacgatgtcggtaatgcggaagccatagttatcggagaagtaggcatcagcataatcccagacctgctgtgccgctttgctttgggtatagagctgcatacccatgcccttttgttgactaccctgaccagtgaaaaggaatgccgtctcctcaggttcgatctcagcttctccacgcagaacggtctcgccgcgcccgacgtgctttgcctccactgagacgatcttgcgtcccgccaacatgccgatgtgctggaagacgacttcaatcttatctcccggtagcaccatactcgtgaatgagcagtggaagctacggaaggcgccgatggttgaggcacaggtgtagtgttcgacaagtccacgtacccgtgccgaggtgtacatgctgtgcgtgatcagacctggtagatctgcatatcgcgacagcgacgcggacacatggatgggattgaagtcccaggagacgtgagcataagcctcgttagagtgtggcatagtgagaatcaaagattcgccatcgttagtcaagggactaggctgatcaaacatagcgcgcttctgcactggactaccatgacgcttgaggtaatccatgacagggctacctcggcaggtgactgcgtgatagtctacggtcgcaatcggccgcgaaccacctgggagcgatgaattcacgcgaacttcaccaacagtagtaacggtcttgaaggtgtccttgctggcgtattggtaggtcgaacgaagtacgaagaccaaagtctggttttccaggtcgagcgaccgatccaggggctggaaccaggacttcgagttcaagatcgcaacctccatcgggctacgggggcagagctccatctcttcctcgtccactttgcggaacatattctcccagtctgtgtggtggcctcggtagaggaattgactgcttaactcgagcacgaccttattctcatggtacacatccgcacgtacctcgaccaatttacctgtctcctcgatcgtaatggcttgtatacgagacttggtctcaagtgcataacctgcctgaatggggtccgcatctgcgggaatgcggaagccattggtgagatgcaccagcgtcaacagatcgacgtcaagctcccgcgagaaaagcggcttcatcaaagcttcccagccaatgacgacaccaaagtccaacggtgccgccatccgtttgccacgccgcttgctagcggcatcgctggcattctgtacacaatgggcgaactcggcgattgagtcggccgtcacctcaaactgcgattcgcggaaggtgtcgtggaccgagggccatgtctctggtggttcacccgcgaaccagactctatagtagaagtctttgacacgctggttgcggccttccataatttcatggatgggagcgtaaacagcctcacgcctgaactggaacttcaactgcagcccaatagcggcacctccagcattacggtagttgatgatctcaagcgtgataacgctaggctcatccactcgcacctccacgaccttgaccggctcagagtgtggccgatgttcgaacagcgtgattatcggatctgccgaaaggcctccgtggccctgctgcaccatcacgtatgattcacgcgtgggctggaaaagccgccgcagcggattctcgcagatggctcggccctgcacgatcgtcgctgcgtggaagaatgcttggcgccagcctccattggaaccgcccaaggccacaagccattctgctaacgagggtgttggtggcgcaccgggcgcaccgtccagtggtttcacttcatataacatcgcgcctgtgtttccgacgggcgagcaatgaatgcccagctccgcaagtcgccagtcctgtgggacagagtatgggctgaagcagtcgacaatagggataccatcctgctggtattcgggatcttgctgctgcaggcactcaatgtgtccatggtagatgttgcctaaaatgtcgcctgccggctcgtccaccttagttgaatatcgcgccgccactgggccgtacccggccgacatcagcgtcagcaacagctgcaagatcctctgactgccacagcgagtcttttttgaagtaagtctcgaagttttcgtcgaggacagggacaaacggtactggctttgtgccgcgtctctggcatagaagcaaaaagtattccgcatcttgcgtgccaataagctgggcctcagcggtcggcaaccgcttcaagatggcgttcagcgctgttgtcggatcagcaagagcctcgtcgccgttgacttcgctgagtccggggccgggggctacgtcgccaatgcgggcatccacgcgctttaggaaatcttgcaggaacaagcggtaggaatcatcgatccagcggccctcagccgacacataggtaagcgcaataaaacggcgcagaacctcggcgtaagtcatctcctccaagtcgataacagatccctggacatcgcacccaaaccagaccttcaccgaatcggtattcagtcgctgaatcaggtagtcacggtgtttctgcagatacgcgacgcgcttactacgatcaaggctgaagacattgcgatctaactcagcccatagttgcacaccccgcgtagccagcttatgaataggttcccccatctctgaggttacagtcataatgccgccagctggttgtgtgtatgtctgctcccaatcaccttcatcctcgactcctggcgcattcacaattgcctgtttcacagctgggctggtatgcgcttctttggcggtcatcaaacgactgccgagaaggataccatcgaagggcatgggcgggcggttataccgacaggcccaatcacctgttaggtaggggaatgtgtcctgtgcaccgccaaagccactgcccgctacaagaataacgttctcgcagcggcggatggagtcgtaggcttgcaagatcggttggtggaagtcctcgaatgagtggtggccaccacctcgcccacctgtccattggagtagaatagggaaggtgggatgagccgatgcgatgtcgaggacttggtatatcgcgggtaaagtgccaggcttgaagcccatgtggcgtagaccgagctcgttgatgtaccgagtggccacctcgagtgaaggcacgcctgcgccgatagtgagtccctccaggggaacgccggccgcgcgtaatttggccagcagcggaatctgccacttcaccgcgtgaggagcggcgtagatcatgttgcaggtgatgccccggccagcaggtaccgcgtccagcagcttgtaaacgtctgtctccaactgggcggcttgatggaatccgcccagtgccaattcgacatgatagccggcgcgcataactgccgcacagaaatcccaggctgcagttgtgggcgtcattccggccaccatgactggtggcaagcccaagaggcgactgagcttagtatcgacaagcacgccgccgccggcaatctgtaccaactgcggtcggtagcgattccgccatataggtccgtagacgagacccttgggcgcaggattccagttaaagaactcactgcgatctcccagctcggtgcgggagctggagatgcccgtggccaggatagtacggacgccagtaccctccttgagtcgattagtgagagttccaatgccagatgcaccatcaggcccaaaagcaagaatatgcgtggatccgggaaaatgcacggcccgtggccagacgacttgctgggtcgttatcatcgcaatgagcttgggaatcaagttgacggctccacacttgcgtagatctgtccctgtgtgggtgcaaaagacagggattcggagttggtcaccggttatggtgaaatccgcgacacgctccagcacgcccggagcgacatctgttagatagctgctgtggaaggccgtggttattggaaggaatctggtatggatctcaggctttcgctggctgaaaggaatccgatgttgcaagccctttgccggagctttcacctgtcgtagccaaacattaaacccatgaagtgacagtggcggtccagccaaaacggcattggtaggcccgttgattagagctatctcaatgcgggcatcaacgggcaaatacccattgacggaagctacataggtgcggagctgggagattggacagtctgccacactcagcatgggtcctggaaagccctcgccgttggcttcggcgtctgcgacaacagccggcggcagctggcccacggcaaattggtcctggctggcagttccgatggcgagcagcaaccgaagcgcatcgagcgcgagcgcgtcgaattgcgtccatgattgtgccactacaatcacagtggctgggatgatgccttgagaatgtcccgtggctccagcaagcgcggtctgaagctgggcaggtgtggtacccactatgcgtccgacgactcgataccaggccagctgcaacaaaccgatgagcggcatactgatagacgcaccgattaggtagtcagatggtggcgtacgatccgggttctcgagccaggtgactatgtccatgccgttgtgatagaatcgactaatgctctcctcacgggtctcgcgctgcagcatactcgagactgacggaatgaggtcttccaccagcgggcgataggtctgccagagcatccgcagctcttcaaagtaatcttcatcattgccctgcccgccgaacacagcatatagtcgtgctttgcgttgctgcgcggcagccaggagcgcagaaggtgccgctggtcgactgactttgcgcagaacatggcgcgcacgtacgtaagcagctaaaatggccgactcggcgtctgcggagatgtccaaggcatagactacaccatggatctcgcgctgcagtagaatatcacgatcgaaggtatcgagggcgatggtcaaaagatgtcggagatcgtcagccaatccatgaggagattgctctaaacgacgcacggtaaaaccaataaagcgggctcaaagctccaccagagaggatatcggctcggccccaccagcggtttgaagatcatggagaaagtcatcgcgcagctgaagcgcagcggggaatgaggcagtagaaatggagagggtatgtgtgaaacggccatctgtgatggtgaggatttggctgccccaaatgttgctgggcgacgacgaggtggatagttcatcaggcgttgaccagttcgaggaagtcgaagccgacaagacagccgacggccccggcaattcggtcgagatcaacatgacagagaaaaaattgagccgcctaggctaggcgtcaacatatttttttccccatcgcgaacgccagaccctgccgtatattcttcatttctttgtctctttttctctttgtctaagcatcgtcgttgacggtggggcgcaatcgtgacgggtgggtcttgtgagatgttgagccctaagcgtctcaccgtgcagcattcccaaggttgccgccaatctgacacaccaaaatagcccggcctctatacgaggctagaggcgcttggggggccagaaatgcgtcggaccaatgccgatcaggcagccgttctaaaggccaaaacccgacggctgatcgactgtgagatttaattcaatttaagaatgtcgcccgtcagcaccttgtgacttttctccgctcgtctgttctgttgttcttctatcactgtctttgatctctgagtgctgttacactcttgttggccgttattatgggttggccaactcattgtggtatgttcttcttctattaatcttctgggccttgactgatcttgatagatttgtccagcgaggacgctcaatatgcctactgcgccaatgggcccgccgctgtcttcttcacagttatattcggactcacctggatcgctcatttcgctcaagcggtcatgtaccggaagaagttctgctgggtgattgtagtgggcacagtgtggcaatgcatcggaatgattatgcgcacctactcgaccatcgatcaaaccaagtcgacgaccacggccgccggacagctgttgattcttctgacgcccttatgggtgaacgcctttgtgtacatgatcttcggccgcatggtctactacttcttaccagagaagaaggtggcaggcattcgggccgaaagactggcccaaatcttcatctggcttgatgtgaggtgagtttcgccccgaaaggcggccctgggtcaactgtccaggacactcttcttgtgtaatgaaactagctgactctgatctgacagctctttcattgttcaagcaactggtggtatcatggactcggactttagcaccgagatgaacaaaatcggactgcacatctacacagccggcattgcagcgcaacagttcttcatcctgtgcttctgcggactactattcgcctttcaccgtcggatgcaagagcgtggtagcatttctcgtggcggtggctggcgcccattggtgatagccatgtgggccactttgacattcatcacggtaggtcacctttccaggaccattagttacagacgactaatgcatattagattcgaatcatctaccgtctgattgaatttgccgataccgacaaggccgggacaagccccttgacccttcacgaggcacccttttactgcctggaattactgcccatgctctccgccatggtcatctggaacatctggcaccctggccgttatctccaaggagatgactgtgactttcccaagaaagtaaagctgtctcgcaatgaaaagaagatgataaagcaagaagccaaagatagcaagcgccggggtcatcgtcgctcgtctagtcgtaagggtgcacgtgtttctgagtctcacccggcgaattcgttcgacgaaggggctctggagtcgcagggttatccattgcgaggacatagataatcagctacatatcaagtagggagtgcatacagagagagtttttcagacatgatcagcaaagtgcctattgtaattccaagcattcagatttactttcaacagttacttgtgtcacaaacactcgaacatgtatcaatgccggatttcaaatactatctgcattatcttacaagttgttcaatctaagtctgtcgagaacggacattcacactggcaagagagaggtataagtactaacagttagagggacattctatagggtagtcctggaagatcagtagcaaaacctatcctccgtggccgcacgaatcataagcttaatcaggcaaatggaaaatctaatatgatgtgaccggagttttgttggaactcttgtgtgtaaatagaaacagagagtatcccgctcacctgggcaggcttaacctgccactagacccaggaaagaatgcaagaacaaagaagagacacctgggtacgctagccccgtcccagaggcaaatgaaccgaagatgcagagaaaccagaaaattgaagatgataatatatcccaaacccattcttatttatagaacagcacctatatgcaagcatcataaaccctcgtctgcccctcaaaatctgaaatatccaactgcaccccagcatgaaccaacatctcaactagttcttgctggttcgactcacaagccatatgcagcgcggtacgtccccaccaatcctgatcattcacagcacgggctgaatgctcaattaggacgcgcacaacccccggctgctgagcctgtacggcgatatggagtgctgtctcaccctttcgggtaacccagctgattaggtctcgaggtggggagctagatagtagcagtcgcactacacctgcgtgaccttgttgcgcggctgaatgtaggggcgtgaagcccgtgctgtcgggtagggcgggatcggcaccggcctgtagtagtactgctaatacggactcgtgaccgtatagtgctgcgcgatgtaatgctgtgtgtccatgtgctccatcaggtcctcttgtagtggagctgccggtgctctctggggttccgcggggggtgtgtagaaatggcggtgcgggtgttgagcaaagaaggtctgtgtcgattgaggtttggaagggatgggcttgattcttgggcgaggtcgagagcgaatcggagccagagcccatggtcttcaaattgaagatttgatgtgtatcctcatccagcgattgtgcccaggggcttccggtgaggccaacttgatccagttgcgaggtgtatgaatgtagatcggacggcagttgtagggggtcctgctgttgtatatgatggtgaggatccgcatatggttgcgatggccattgccctgatgattgtggtcccacagcaggttgctgctgtggtgcccctggttgagaagattttgagtctagaggagaagacagcccaccggcggccgatctggcagtggctttagtctgtgtgctgttctgggatgtgggattctcgtcccccttgcgtaaccctaaaactcatcatcagctctgtgatctaccaagatcgtcccgctctatccaccgagtctcagtctcaattttgcaaccaaagacaattttcctactcactttttcgatatccacgttgagcaattcgattttgcgcccgacgacgctccactgggtcactgatattcgcccagttctcgcccagcactggggttctaatcacgaagatcatcgatttagcttaggcaactccaatccaatttggagtcagggggagggggggagacgaacgtgatcatgatgcatagaggctcacctagcatggctatgcaggcaacaagtaaaacaaccacaggcggggaccactcattcagatccacggtgtcacaaagcagtctcagtcatgatacgcattaattatccgcatggctctggtcttcatctccttttaaatcttgctgacgaggtggcagtcaagaaccaaccatcttaggtgctgttcgagcgcatccgcgaacggcggcagtcaccatcgaccgtacccactgataatgcgcacttgttgcgtacgcatttggatacggagtttccttgatcgtacggtctgggtacccaggggcataggtgccagggtcattttcggatttaatgcatgcaatggtgccttaatgccttaatttggactggcaaaatattaaaatacctgaattacaattacagaagcctatatacctgagtatcaggcctatagagcgatttctgctatacaactccatatgtcatatgattctcaggcggtttggacctgaactcagaggtaatagcgatctaatttattatatctcttaagagaaaataatatataacgtattcagtaaacgagctacgcaccccaaaacacatagtaaaagcgataaattacaacatgatattgcaacaacggtggtcaatataaactttatcttgtagcccatcactctccatatgatatctgatcactctagggagttttgagaaatttgatataatagtgatttgagatatatatatttcctatagttcagtgatgtaattttcaataccgcaatgatgcaactttctgatttatttgaaattgagatatattgctaaacatgcttatcgatggctatcgacaagtaatgaaagcaagttgagacgtggttgttgagatataaatgtggaatatgttgcatttactatggtgttttggggtgcgcagctcgtttaccgaatacgttatagattcagctgaataaaggtagataaggaggagagaaagaggaggagaagaaaaggaaaagagaagaaagaggggggaaggtatcacctcggcaacggatatttactcacgcgttagtcaaagggttcgtccggcgtactggttattccgtgctgaaagctttacaatacactgtatcctggggcctgaaagcggtcagtgttaaggctaacattaggccaaattaaggccaaattcaggtactaaggccacaatatactacattaaatccgaaagtaaccctggcacctatgcccctgggtagtctgggtatactccattgtaaaatattcagcaaaacccgtggaaaaatcctttgttcctggttgcacacgctaatgcagactaatggtctgagagtgttttcgtttgaccaatagccgaaatgcctcagcgatcgggctagcggcggggtttcctgcccaggtgccaatagggctgttaaaatcacttgaaatttaaaaatatcgtttcaatttcaatttcaacgctaaaatattatttcatttcaaaatcggtctatgcctcaggcatggacccactcttagtagtccaccaattagataccttaatttttcagagagccaataagattatcatagcttactctaagcctaattaggccgaatacaggctcttacctacaccgcctagtattcttcttagaccgcctacgcttatgtagcgctagtccgctagaccacgtagagtgcaatgtataggtcaaaaatatatctctggtaatctaggtaagaaaatgctccctatagcccctatatccggccaccccgtcctgcttcaggtactcttatacgaggccgaactatataccgataatatctaattatcctaccctatatctatagaagacttatagtcaaagagtcgctctgagtactactatcgctagtaccactatcgctagtactactatcgctaatactactattactagccctactaccgctagtaccacttcccttactactattagtactactagtaggactatagggactattattattattattactctagttatcactcttactatcttaatagtttagcgggtttataaagggactgtatcgctatacgtaagaactagcctctaaataatctatagggcagtgtatatagtagaatttccttccctatcgttacctaaagcaggtattacagctagcgatacctttaagttagtcatagaaccagcctactaaggtatagttacctctacagctaggcttaagtgtgaaatatagttaatactattacctcgaaatcactaggtatataattatattcttacctataacgattctactatattcccttcggcctatcgttagtagcttaaagtacctagtatagaaggtctagaaataccgatatatagtagataggttattatatactatactatatattatattgctatcgctaataataactaggtagatatcctagttaactttattctatttaagtattaggtttagcggtctattattagaagtaagggtaagcctaagctctctagataagactttaggtagatattatcctatacctaggtagagttagtaagtagctagcttctaacctaggttagggtcttatactaggcctatatatatttagtatatattaggaagatataaggtttttaacttactataggtatatccctatactagataagggtttatagtattctagactttatttaaagtaaatatataataggaatagctatcggtagactagaagactagaagggctactatttttataaagataagatatacttaaacttaaagactaagaaaattttagaggacttagaggatagagattctagagtagaaaggagagggtttataactattctattaataaagaagtattccttctacccttctaagggtatttaggaatatcgctttctattaccttcctaataaagaagaggtctatatagaattctttagttctttagttctttcttatatataatactaatattataaagatactcctataataagaatctccctttattactatctaaccgtttttagactattagttataagcgactgtactaggatatttttataaaggagagttagaataatattaataacttttctaataggttgatctctaggtttaggataaagtactttaggtatcttagcgcgaagatactttatagaatacttagaggatagagtagttagtattttttattttttccttatagcctaggtcctatagttaggtagctaactctacccctgattctattatagatctaggttaaatataacttctactctatatcctattctagaaatactatataaattattgactatctaaggggaaagtataagtaaatccctactaagatctgtataatctttattaaagaaacgaagaaaggtaaaatagcttaaggacctattagcttttaaggttagggtagctatagccttaggaaataaagggataatactctagctagatagctttactagtctagctggctatttttacttatagacgatctaggcttctaggaattctatttacttatagatagtacttataagctacctacttattaagctattagtaccgaactccttaataaatagtttattagcctttagaataaggttaatataagattaaagataatatagtatcttaatcttacctataataagtcgactaataaaagtagataccgaatctttaatatcttattcagttcttagtcctatagtatctattactatagagataagattaaggatataagtataataggggaggaagttattagcctagtctttaagaaggtataggagtacctaatctaagaaggtaataggttacctaattagttctatattaactctctagctatagatatatataaggtaataaatatctactactaactacttagagtataacctaagataagttatatattttatatcctatataacttatacagcctctagctccttctaaaggatatcctcctaagaagtaggattaagagtacgtttaagatagtattagagattatattattctttaactcagtactagacatcggcaaagcccacccggcccatagcccagcccagcccaacccccccaaaggccgggggtttgggtgaactnnnnnnnnnnnnnnnnnnnnnnnnnnnnnnnnnnnnnnnnnnnnnnnnnnnnnnnnnnnnnnnnnnnnnnnnnnnnnnnnnnnnnnnnnnnnnnnnnnnnnnnnnnnnnnnnnnnnnnnnnnnnnnnnnnnnnnnnnnnnnnnnnnnnnnnnnnnnnnnnnnnnnnnnnnnnnnnnnnnnnnnnnnnnnnnnnnnnnnnnnnnnnnnnnnnnnnnnnnnnnnnnnnnnnnnnnnnnnnnnnnnnnnnnnnnnnnnnnnnnnnnnnnnnnnnnnnnnnnnnnnnnnnnnnnnnnnnnnnnnnnnnnnnnnnnnnnnnnnnnnnnnnnnnnnnnnnnnnnnnnnnnnnnnnnnnnnnnnnnnnnnnnnnnnnnnnnnnnnnnnnnnnnnnnnnnnnnnnnnnnnnnnnnnnnnnnnnnnnnnnnnnnnnnnnnnnnnnnnnnnnnnnnnnnnnnnnnnnnnnnnnnnnnnnnnnnnnnnnnnnnnnnnnnnnnnnnnnnnnnnnnnnnnnnnnnnnnnnnnnnnnnnnnnnnnnnnnnnnnnnnnnnnnnnnnnnnnnnnnnnnnnnnnnnnnnnnnnnnnnnnnnnnnnnnnnnnnnnnnnnnnnnnnnnnnnnnnnnnnnnnnnnnnnnnnnnnnnnnnnnnnnnnnnnnnnnnnnnnnnnnnnnnnnnnnnnnnnnnnnnnnnnnnnnnnnnnnnnnnnnnnnnnnnnnnnnnnnnnnnnnnnnnnnnnnnnnnnnnnnnnnnnnnnnnnnnnnnnnnnnnnnnnnnnnnnnnnnnnnnnnnnnnnnnnnnnnnnnnnnnnnnnnnnnnnnnnnnnnnnnnnnnnnnnnnnnnnnnnnnnnnnnnnnnnnnnnnnnnnnnnnnnnnnnnnnnnnnnnnnnnnnnnnnnnnnnnnnnnnnnnnnnnnnnnnnnnnnnnnnnnnnnnnnnnnnnnnnnnnnnnnnnnnnnnnnnnnnnnnnnnnnnnnnnnnnnnnnnnnnnnnnnnnnnnnnnnnnnnnnnnnnnnnnnnnnnnnnnnnnnnnnnnnnnnnnnnnnnnnnnnnnnnnnnnnnnnnnnnnnnnnnnnnnnnnnnnnnnnnnnnnnnnnnnnnnnnnnnnnnnnnnnttgtacagagatcagacgaattggtaaggtgatctgggaatagcttcatttttaatatttatggatagatcattttttttagtatttgtgcgtagattagataaactagtcaggtgatctaggaatagcatcatttttggcatttatagatagatagattagatgaattggtaaggtaatcatgttttttaccagactaaaacaagtgataaaaacctataatttattaatcttatataatctgacttataagcgccaagacctatataaaatacaaaaatgggctaaaataggcccattatgggtttatgggcttagcccactgggctatgggctgggctgggcctaggggagctgggcccatagcccatatgggttgggctatgggctgaaatcttgggcccatgctgggctttgccgatgtctactcagtacctctataactaaatcgatttcagaaatattaggtcgaaatctactataagatatccgcgttcctagtatctataataatataatagggcttgtaatttaagatactctacttagttcttaaatactagtaggcccttaagtactaggcccttaatattaaaaaggacgataggggtagagggaaaaaagccttaattgcctctaccttattagaacctaccttttaggtagatctcgataagttaatctaactcctagagctaatctataaggcgtagcttatatctaaaagctaggtatccgatcttataaaggtaagtctattatatataaaatctatatataatatatacgaagtctatatataatatatataaagtatatataaaacctttatcagcctttattctaataaagataggttatttcttaatagattttaatctaggagtaccttaagacctatatattaatatcaaaattttaactaattatataggaatacctagaggataaaagcctaaatagatttaaatatcgatttaaccgataaattaagctaatctactagcttatattttatctttagctatcgatagctatctaagatccgtccttttccctagtactttaaaagctaataaatatacttatcttaaagtataggggagagcctactaaaaagtagttctagtaattttagaactaataatagcgttttttctatactaataatagtagtatctagtctaactaggacctagaggacttctagtataaggcgaaagtattcgctccttagcttactaatcttaccttatatagctataatactacagctaatttagttaccttagagcgggcattttctactataaactttatttactcgaaggtatacaattcgcttttacctaagaaggttaataagctagtctatctccggataaactatcgacttataagtaaagggcctatccagtagcctgacctagaaaaggcgtaggattagatagaccagtttaataaggagtagattattagaaatcgcttcttccaggatatgacttctcttaagcctcagactgaaagccttagtctaggaaataagctttctgactctaagtctactaataggggtaggtatattgtaataagtgtaaagcgtccttatgacttatataactaaaaatttactaccagtttttctgccttttttttctgcttatattacaaaatattactaatacattaccaatatattactagcgccttagcgtgaaacaattgaaattatattttaaatttcatgaaaattaaaaatataatttcaattcaagattttgaaattcaatttaacagccctaggtgccaatgctacctcctgttttcagagcaggttttgagttcgactccagaacccgcactgctccactggggagtggcttggtcaaaaggtacgagtacggagtaatccgtgtttagaccgacttcaacgccctacaacttccgtatgacaatcatgcgaccgagttcatctatatgattggatcatcatattagactgcccatcggtaatcggacaattgaggagcaagagcatcaagaaatcaattctgattcgtcatgttcgtaacagtcccttgtctttcatacaaataatcggggctagcatccatcgagacaagtacttccaaggtttggtcctcgggtaccaagctttcaggctaaccctccttttgtgatctttcctgatggggtatagtaggctagggtttacgaacaaaggatgctcactgtgcagcaggcctagaatattagtccccgacttctccactttgtacgttcggaagctgaccgacctgagttttatttagatgaaggctaccgttttgctggtagacaatttagcgcgttattgaacactttaattcaatttcggtttaatgccgatccacatcaatttacatagaagtatacagttctttacaccgattgaagataatcgtgatactaccggcaatgcgactttggatctgaggtcaggcgtccgaagtacagcaactaaatggagtgtcagcacttctgcagctgcagctgcatgcccttacactattgatgccttcccacatccctccgttcggggtttattgaaaaccaaagtggactataatcaaagggtcgatccaagtatcgacaagtgatgctcattcttctcaaacagaagtcagtcaagtcatcgaaatattgtaacttcacgcaagctctgctgctagtagagaagaagacagactgtcaaatacactttaaacccagttgaaatgtggaattgatcaattagaaatgtgcctatagatgaaaaggcgctgttttgtattattcgtagctctcagtgttataagtagtagagattgtgaatggggtgttttgtccgcagacagggtctcttcgatcggtacggagttgtgggtgtcctctctcaataaacgcgaggaatcaattgtccatgcatcatgtcggagcctatggtggattataactagccattccagagcgaccttgcacatcaggcagcaaaaatggaccaaacaggggcttaacgaatacaacaaaaatagacgagcggccttagcgccaatcgatactgatctgcctgctgcttctgcttagaacctttccaagtcaatgaaagccagaatgaggtagcctgaagctcttcatttatctaaaagcgcggttagttcgacttgtaaggttacattgattaaacaatcttaccgcaccaccgagtaattccgaaatgaagctcccctctctcgtcacagcgagtcaattgacttttcccctaacatttcaaactgcgttccacacaaccagcaatacagcctcgctgctttcagcacaatatggcacaacactcaacgtcgacgtgacgttcgccaatcagacattcaagcttctcgtcgatacaggcagcagcgacacctacgttgtcagaaatgacttcatttgcatcaatcaaacaaccaaccttgagatccctcaagcggactgccagcacgtctccccagggtacaacgaatcagacacctatcgtttgatccccaataaaatattcggcatacaatacggcaatggtatagcgagcggagtcatggcctacgaagacatcacattagccggtattactgtccccggacaagccgtcggaatcgtcggccacagcaatcccatgggcgacggcataaacagcggcgtgctaggcctcgcctatccctccctcacctccgcacatccaggagaccataccgacaatacaacattttggttcaatcgtgaatgctacagtcccttgttcaacaccatgtacgaacagggccttgtttcagaaccctacttcagcattgcgctcgcacacacgccgcgaaacctttctatgccaaccttcggcgggtacctcactttgggcgatctaccgccggtggcgtatgatccgaaatttgccagtgttcccgtagaaattttggaaaacattccgcccagtttcacctctggcaagcgcactcgatcatattgggcttttaccgtgtctgctgtgacatttggatccacaacaaaagtggatctcaccacgagcacgacctccataactaccaacagcatggagttccaggtatttacagataccgggaacgactacagctatctgcctgctgtggttgcggatcccatcaatgccttgttcaatccgccagctatctacaatgagacgctgggagttgctgtcgtcaactgtaatgcacagccaccgatgtttggagtacaaattggagaccagacattctatcacgatggacaggatctcatttatcagaccggtgatgggtactgtgtctcaagtttagtggcgtcggagcgtgtggcgtttgagggcatcatgttaaacattctgggtgtgccgtttttgaagaatgtggtgtccgtttacgatttcggtagaaatgagttgcgatttgcgcagaggtcggattaaaaactggggttggggtagtgctttatatatttagatgaaccagtatcgaatcacgattcatgaccttgtatttagtcaatttctcaactggatagggacattcgcatccagttcaattctagaattcatctcttattcaaacctctctttggcttgggcggatactttggtatgggcaatctcttgttcgtgtctcctgacccgctgctcctgcatgggattaaacagtaaagctgccggctacgagaatattatcgtgctcatcaacaagctgcagagcaagaaactagctccagcagcaaacatagacgcgtacgaaagctgggtcgttctggagatttcatcaatggccgccatttattcctcggtgctggcacagcggaggagctggataaccgcatcggtgattgcgttggggacttagccctcactagccgtggagaacaccgactgatcagtctatcaacgctcttgctttcacactaatattaagatcaaagtcgacatgagtctcatccagctgaagacaataacggccctctatccactgactctctccgcactgggagatttctttacgaccagtattcaacgccccagggatggtatagccggtaactccagctgattgtcaaacgctgggatcggccaaattgctatgatgcaagatcagcctggtcctaccgcgacagtctgcattcgatattaatcaaattcaatcgagctggacgattcagacactcagcatggtaggagccagtccttgccacaggaacctagatctcgataccatgacgaacattccggtgaagaaccactacggggatcggtccagttgaaaatttgaactcaagacttttgaacctgaacttggtgaaaaggaactactcacgacgcttccatcgagaatgagtcctcgccgtgttgagtgtctcctttattcctaggagcaagtggcggcagcaagagcgataatccgttaggaatcaagacaaaaaaaaatcatgaataaaacactaaattggatttacaaaccatttgactgaaattttctaagatattcctcaatattgtagaaccaaaaatagagggttagatatttcccgcaacaatgagagatggtatcgtgaatacgagacttaacgagctgaatagtggtatagccgtagaatagtaatgccaataaatgtggtcccactatacatttgcctcccaactagaggcgaaacaactcaggatcgaccgccatattaataacgccagcctttcgttgaggggacaacgggcaagagtgctaggtgaacgactgcattgggatatggctagcgtggtgcattttattgaggtgagctgctgacttagctgttccaactttgctcaggtgacgctcagtgagcgagttcatccagcttatgtaatgatcaggcgatgctcagcgagcaagtgcaagtttaatgattatgtaatacttaagggcgtgctcagttgtactcagtgagcaaagagcggcaaggggtgagcacgaaagcgaaaagggaaagccatctcgctcggcctaaaatccggtgtatatgtacgtacctagcagaggcgatttaactatgtatatcgcggagttactctgcggtgacggcgaattactaatttcggtttagcgtgcctctttgggtctagctccctctatatgactgatatcgccgtgcgtatgtctataaagttgcctttatcgccccgactgttactcgccgaacgtttcgacggttacggtccctttcttactatctatatcctatatatgtcctgctaataaggtatttttgctattaatctagcttactaagccctactgcccccttggttactagtgtgacgatctgagaaggatcgtacttgctaaacggggcaggagcggtcacgtcctcgtacttgccaaacgaggaaggaacgactatgcccttgcaccttcctaaggacgaacgagattaagcgagacaaacgcaagggtataagaagggaagaacgcgcactcagatagtttctctttttccnnnnnnnnnnnnnnnnnnnnnnnnnnnnnnnnnnnnnnnnnnnnnnnnnnnnnnnnnnnnnnnnnnnnnnnnnnnnnnnnnnnnnnnnnnnnnnnnnnnnnnnnnnnnnnnnnnnnnnnnnnnnnnnnnnnnnnnnnnnnnnnnnnnnnnnnnnnnnnnnnnnnnnnnnnnnnnnnnnnnnnnnnnnnnnnnnnnnnnnnnnnnnnnnnnnnnnnnnnnnnnnnnnnnnnnnnnnnnnnnnnnnnnnnnnnnnnnnnnnnnnnnnnnnnnnnnnnnnnnnnnnnnnnnnnnnnnnnnnnnnnnnnncttgccgcaggaacgactatgccctcgtaccttcccaaaagaacgaacgagaattaagcgagataaacgcaagagtataagaagggaagaacacgcacttagatagtttctctttttcctttcttcctcgtacttagaatttgattggaattgcactcttttcttctgaatcgaattggctcgtaacaactagcgcgaactgactaatcctttaccctcgttcgatctctcgagtactctatacgtagctttacctcacctatcctataacggataaaggtccgtacaagagggaaacacatataaacctgcacaggctcgggaaggaacatctatgtcattacatatctgtttcgatatcaatccgtaacttcaaataacgcacttctgtacattccttatatctaacctgtgtatcttaacaacaatgttattccctggtctaattattcttagatagcgatcgataaggatcttaaactcggcatcttaatattaaggtaatcaaacctctactttattatggtttcgaaaattacattgtctagagcttgaaatatcttgaaatatatatatcacgatcacaaagtcataaaacttatctaaacttagtaaagaggctagatatcacctaagaagtatcgagctataagaaaaacctcttatagaccaccgttattaagatatcaggttgtaatttatcacatttactatgtgttttggagatggcgggtcgtatgtggtggcggctcgtatgtgaattacgttagtggtatattagtagtcagcagccacgtgtagcgattatataaacacataccaagataactagatctcggaggagaaccctccttttcacaaattacactcattttaccctttggtccagtatcctactgctcgtaccatacaaaacagcctctcttttgttcaacatatatcttttatctatgatatacgcgccgagggcgttgatatataatgaatacttattcctgtaagggcgctaaacctaacttagctagtattatatttaatggtctaacgcgagcgctgggtgaaatgaccacgatttcccctcgaaagaccacgcacaaacgtggtcttttcgccgtcaccccgacttactccgtacaatctttccgtacaatatacggaatccatagctctgtttatctcaactccgctagcttaatcaactagacataacaagaaatagcgtccctcaatcgtatcagcccagggccattagcctatcataacctctgatcgaccctcttagtacaaagtgttttctgtattcacaaattccaatcacgcttttctctcctttttattttacatccgtgatgttccgagggaattcgactgcagatggtagtcgggggcccctgtgagattaacttggtttcagtgatattaatggtcaaacttggtatttaatattatgggtacttcatatatatacggagtccaatttcaggcctatggctggggcgcagtcatgacatctgtggctttcccctaccgtaaaacctttcataagaccgattgtggctgaagctgagcaatacgatggcttttatataggaagatctgtttccggatctccgcaaacgtggttcataccctagttcatctgaatgtgtacaacatacatagatattgcaatagaatacggagtatacagagttgtgtctatttccggctccgaaggaagatggaagagaggtgtcgaatgtactgtcatcaatgtggttccacctgcacaacgggttattattcgtgcagtttttattattatattgcatattccgttccccccagagatctggaccccagcttgatatgtgatccatgttctagccctttaatattgagctggaacagcgaagacacattgcagccattgcagccattgcagccatgcctgcatttcacactctttgagcatgccgtaaaatattaaacctatttttatgtcattagcagattgaatgaacccaaaaaaattccccgatgtcagaaagatacttggggccgatcccttgatgcggtcggacaagctgcaagcatcattgcttcggcacgcgcgtcgatcactactttggtatgttgggattatcaactccgcctcccccttctaaggcatgtggacagtcgatcctggacatcccttgtaattattctctcagcctctcgccttgtgcaggacccattggtgaactatcgatatctcctagtcgggcagtttgaacgagtctgaaatgatcaaaagtcgccaatctccttgtatcggggttgatggcctttttactctttgtatcccgataacctcttccataaacacaacattctttccaaggttcaagagaatgtcgcggtggggaggaagaggggatatttgacccctcctaccgttgttccaagtcgtacaacatacgatgcacaatgccctgtggccatgtcctgtggtacatcagtccggtcgtcgattgaatgtcgatcagggatacaaaattgatgcgttcatctgcatgttgtccgaaccacccccaggtaccggtccaggtaccggcccaggtaccgtatacatgcacagttgatgccgtgtatgggattcgggagccgaactagacctatctccttggaatggttcaaagaatgtgcccgatatgccgtcctgatttgaggaactggagatacaggtgtatgctgtttacttcggtaagactacactggaagataaacccacggtccatgtttccagaaaacacctgggcacgtacaaaagtacttcgctttgttggcgggattcccgattataggttattctggacgaatctggagtacggagtactttgacactatatatcttgcccaatgttagttccggccgaggtaggtgggtttttggagtggaggtaggtgacgagaccaccgacgcggcaaaaaacgcgtcgttggagtgctccaattaacgaaagacgtcaaaagaacagtacaacatacaacatagagagcgagagagtgggaaaacaaggacagaagcagatcggggaggccgtttttgggaaaggcaaagtcaatttcaaaattacggtattgttctgtacggatcggaaaaggaaactaaagttaattatagcatcagactatcaaggcaccaatatgtactccgtagtacatgcccaactctcaaggctagcaaatatagattgctatatataattgagttggcgatatctgcgcctgaccatccatgtgtgtctaccaagtatgtatttcgagtatatagtctacgggacaagcttcagtctaattgttgttccatatatcagccgcaaaatagccagatatggaggttatacccgtaggatgttgagtagaagtaagcaggatggatctcaagagtgtatatccaaatagacgccaaggaagtagatcaagaagaagattaagaacatctgcatccatctcttttccgtcaaaatattcttatcgctccttgatttccgtttccggactgagggatccacgaccattgagaacttccaagtatcaaggagaaaaaagggaaaaaaatttgaaaagagaggtttggataaccgatcgcattcaatcgttttggtctattattttacttcctaaagcgtgaaggcaagagaaatcgagaggaggaaaaaaagataacacggcaaaaagaaacttgaacgtggacaaccctgtcttttcccccccccggtctaaacttccattcgaatttcgaatttcatccttcctctgattacaactctccttccctttttttcctcctcaatttctcttccctcttccctctttcaatcccccttcgctcttttcctccgttctctcgttttctcgtgttatagggaacctagaccttttgacctgggactttcccacccagttccttccagatttgagagatcatggctcctcctccacgtctgcgcatcctgtccggtgagttcaacttccgcctaaatcttaacgtctgggatatcacaaaaagatggttcgtcgtctaacgaaagtctgtgtagtcggtggcaatgcgatctcagcctttctctcatggcgacttcaggcgacagcctcctgcgacgttacgctggtctggaaatccggatttgatgccgtgtctcaatacggtgtctcgttcaagtatgtatctaggttgctgtgtcacagccagatggctaactccctccgcagatcaaaagcattcggcaacgaacgattcaaaccccgacatggtgagatttcgatatcaacactcggcctaagccctagccagagcccccggctgacttgtcccggtttctagttgttcgtgctcccgaagacgcctcatcccgtgaaaatacctatgactatgtcatcctctgcgtgaaagccttgccggacgtctacgaccttgcctccgtcattgaatccgtcgtcactccccagcacacctgtattttggtgaatacgacaaataccctcggcattgaagcccatctcgaacaaagataccctaccaatgtcatcctttctctcgtttccaatgtggagatctcccagacgggccccagcgagttcgaacatctaagctcgagtgagatttacgtgggcgcaaccaacaaatcttcctccatcccgacatcagtccagaacgacatggcggcggcattggcaatgactttgaactccggtcaggtcgactgcaaggtttccgataatatcagacaggagcagttcgaccgaatgatagggtgagttcctttcgatccgctcgaatccaaactttgcatgctaaacgtctcccagcccgatcgcgttccatcccgcaagtgttttgttcgacaccccaaaccatacacaactcctcgaaaaaaccggtgttcgtccactgataatgggcttgatcgacgagatgatggagctggcctctgcgcacggttgctcattccccagcgatttcccggataagacggtccaaaaaatgattgcaatggaacccccgaccacaatgtactcagatttccagggccgacgccccatggaggttgagactttcctagggtcaccaatcaagttggcaatcgagtccaatgttcgcgttccccggattgaaacaatgtacgcaatgctacatcacatcaatatcgcaaaccagaacaagtcccggcaagagtcaccccctgcatcggtcatgggtcagccgcctccccgattgtcttccgcacccccacagcagcggcctatgatgaatggtggcccgccatctatgcggggaagtcgaacaccctcaagcatgagcatggtcccgccacaaagacgaggcccaccccctggtatgatgccaaggggcccaggcggaccgatgccgatgccaccctccaaccgagttcagcgcgacccatcattggagggacttgaggaattcagccatttggttgtctacgacgagcagggcgaaccgagtataccgcatcagaatggaaatgggtaccccgaaccagcacctggccctgcttcagagttgacattgagggagagagagctggctcttcgccaacgtgagctacagctgcgtgaacaggaaatgaacatgcgccgaggtcctccgggcccaggacgtcgtggaccggctccctcccgccctgccacggccttcgatgaagaagatgaggattactttgacccgatggataccatggcgattcctcacatcgaccccgacagtgtcgacatgatgagcatgacttcacgccgagggcgcaagggccccagccacagccagttgcgtaaaaacccagaatttggtgtaagcgctgctccttctggaggcagccgcccttcctcatcagccttcaaccgctactttggcagaaaacgcacgagtgaccgtgtgatgcaagaaatcccgggtctccatgattcacttatggacaaccccatgatgagctactcctccaacagatatggagccgttgaccgaaaccagatgcacgcggattctcgagccaattctttaacggctagccacatgggcgactacccacctcgaccttttccacagagccggcgaaacagccagactcctatgactccattcggtggacccccgggaccccctggcccaggagggccccggatgggtcgccctccaatgcaaggtcttggcccctctggtggacctaacaatggccagccatcacctcctggtaacatgcgtacgccggtgccgcgctatcctcagggacaaggaaacgcggcagggccgcagcaagttgagcaacactatggggtgagcaacgcgttccccgctaagggccttcctaaaaaccagaatctgaccggaagtgcgagcgccagcgcggggagtggtgacagtggagcaagtgcaaatattgattccgaaccctcatctcacagtagtcaggtcagcctcggcggccagggggtcgcggcgcccgttcgctaaaaaaaatcctttgaaaaaaaatcccgcttttctcaacagctgaccggcgttccatgattgaattcccttttcggcattgcatttttcctcggcttagacaatcatcgtccgccgaaattggtcatgtttggacctttttgcatcatggtgtcattgtgctgggactttattcttcggtcccgtgctattgaagcactggttaatactctgctgttcgcttctttacatatacatgagggacataggggtattcgttgctcatcttttcattttttttttgtttcggagtgtggttgggataacgaggtgcgcgtgcgagttttgtctttttttgtgtgattttgctctgcatcgatactcatcctgtttcgcggcattatcgatttttaatgaggccactacgcgagcctagactgggacatccttatccttgctgtttctcttcctcctacctccttttttcatctttacagcatgtcgatatagcgtcgtcgttggctcccctgcccaccttttcatctctctgcatgactgtatactatcagctggcgcattccgtttcctcccatctagactcgtatacgcctattgtctccattttgtctgttcatcatcattcgctcccccgggtatttccttcatttgccgtgtctttttccttgtctctcattcggcttggcttgatgcaaatggcctcatctttgattttgtggttcggtctggtcttggcgcttccaaaagagcggggattgaatttattcggttcattgagttgtgtcgtgatctgcttatggggttcgcgctttgctgagaaaattaatgaagggtgcactgcagtgttccgtttcgctgcatattttgaacagcactttattgttccaaggagcacacaaattgatagaccttaccgttataccgttgaggttgttacagcttattaccatccaagtacgtactattttaatgaatgaacaggagatattcgaatgctgtataaaatgaagtatatctgtatcgacacgtgattgcctgatagtaaataatcgataaccaacacaacctcaaaacaaaatccaaccttcacgcgagcaagaccatacccagaaccatatctcccacttgagccagtttccaaattataaacaaaatgccaccccctccaatccactgccgccaagaatctaacaccacctactcccgcccctctatcctcccagggaacggcaactacaacacaacagcaacccacacattcaacgcaaacccaaacactatatacacccccaattacaactacaacgcctcaaccccttctatgtccgctgctaaatcgcggcaatatgctcacctccattcccagctcgcacagctcaacgccaacctcgccgacacggagaacctactccgcatgaccgccgtgcaggcaggggacatgcgcttcctaggcgggtattctgcggcgctttttatggcgtctgcgaaaatcctgggagaggaaggggtcaagggaaatgcggacaaggagaagaaggctggttccgaagaggggggaatcaagagggaggagagtgatgaggattgaattgatggatcattatgatttggtattgatttgatatgattatggtgagtcggattgatcgtagttgtgatgcttcatgggctgtcggtaataatttccatgacttggtgtgctaacatatgtccaatgttcaacccaacagcagagatatgactccctttcttcttatgctctctctatccaaatgaggtgttttcttactccacaacgaattgaccaccgagaatgatcgctggctcatcgatgttatggtgttcataactatttccagtcatgttagctgtgctccatatactacggcaggggggtgatttatctctgcctaaaggccgagccagccttacctgagtgtgcctacaccaccagcctcgagaatgagtgttgtctccgtcaacggctttccagtccagcgcatggcaaaagcacgcagaatatggccgtgcgcgacaacaagaacatcgcccttgagattatctgggttctcgaagcagggacgctggtatttgttcttgatttcatcgatcagagcgtcaaggcggcgaatgacatcctcaggggatctgccaggagggaaatggatgttagcatggaaagactacacccgaacaatgttcaacgcatagcttggaagcaagacctagaatcagaggacaacgaagaaaataatcacttactctccaccgggacacccatcggtccaaatattccacggcccctcgcctttttcaactcgcagctcacggatctgcttactcgtcaacccctcatagtccccgtaatcccactctctcaccgcctccgtaacttcaacctcagcctcggtccggattgcctccttgttttcgggcttcccttgttcaccccaaggcattcgtccccggcagccaagctcgaggagctctagggtacgctgggcgcgggcgcggggggagacaaagctagaacggctttgttagttgcctttggagtggaatagtggtcatcggtgtcggcgaattgtttcttacacatgagcgagcttcctgggaacaactagtctgtcgtttccgacgagggctttgcctgttgcttgaatgcgcttctctccattggctgtcaatggtagatcggtgacaccggtgtgtcgaccattaagcgaccattcagtctcgccgtggcggataataaagcatcggggagccattatatattatttgaaatggatctagtgaaaaggaaagaagacggaatgaaaagtgaaatccggcacaggttcaggtctgggtctctttgcgtcatgggtggaccccgataacaggcttatcaccttttctacctccaacctcggaagattgtccatgtgcaactattcggctttcagtatattaaacattagattatcttttgatctatccctagcccagcaaggatatcaacatatcactgacaagatacctcaagactgtggatttcttccgtgagatgggtctacactttgtagtacttccagtcttgatctcttcgaccatcgaatgccgtgaacacttcttatccctgaacaatttcaccttacagctccgatcgatattgacgttgatgagagcctccgcaactccattctcgaggttggtgcggcagcccgaggacccctgtcccgcgtagctgactgcagtgccaacgcagtgcttgttgtggaataggtcaaaggtccagttgtatttttgggcttggagttcttcgggaggatgtgaggtagggtggccagctatggttgctgggaggaggagagttagggcaagaagggattgttggatcagcttcattttggtttgatgggttgattgctttttctttctttctttttcaatgggagattgagctagatatagttccttctcagcattgtgtagtgatgactgccgtcctaggtcttaccgcgggttgacgcgcacatgcagttcgtactatgggaatacacctgatctacctatcaatttgtcttacaggatattttgcatacattcaatttctctatctgcaacttggccaaatgctagcctctgtcgcttgttataacccatgtcgatcatagccttggaacagtataaaccactcagccctctctctgaccttcgatccaatgcttctagagagggagtccaccgcctttctctccgccttgtttacactctttcaagtgagccgagttgtccaatattctgccaggcaaatatccatgccaccatgtcttgcttccacacaatattctttgatacaccatcattcaatgaaaccgtggacagcaaattccttgacccaaacgagcccttgggggacccatccagcccccgagagagcagttcactgaaactgtcggccatatttggtcatctaaaacgttaatatggaacgccgactcacctctagaaatgtgagcctggactgggttgagcgaggtgatcaagccggggatattgtctcagtacatctcattcaaaacacatatgcccggctgaaagcccagtatgcagaaaagctgcgccagaattgggttgaacaacttgagtcacccaaccaagcccttgagcagctgtctctcgctgcgtgcctaattgaactgtggaggagcatgtacggcgctataccaacaacagaacaagagcagctattggaaaacacagcgccgttcccaggattcgtggacctggcttgtgggaatggtatccttgtatacgtgcttctcatggaaggatacaatggcttaggctttgacgcttgccgtcggaagtcctgggaaacattcccatcagagatacaggaatgtctggaagagagaatcttcattcctcggccttttggggatgtactggacttggaacaaattggagcggcgatacacaccggcgatttcccggataatacattcatcatctccgaccacgcagatgagctcacagtatggacccctttaatggccgccctatcaaatccctcatcgccattgccattttttgtggttccatgctgttctcgttcacttgctggttcgtcgtatcgatatcccccgccaaaggagggtggtccaatacaaaagagtgcgaatggaaaccctgtcgcaaggaaagtcgatgataagatcgaacagaatctacagcctgcatctggtgatttgagggcacttcgggcaatcaagatcgaagaaaaggccgagagcgggtttctgaattcgatgattggatctctcgctgcaaaaacaatgagtcttgccgaggaaattggtttcgatgttgagaagacatggctacgcactccgggagcgattaacatggcgctgattggaggtcgacagcaggtcacaagcgagtggctaaagaacccggggtctatagattctctaacgaaaagaaaccaagaagatgctgttctgaagaagattatggaagtggttgagcgtgagtgctcccgagatggtggcattcgggtagctgctaagctctgggttgaacggacgaagagtcttcaccggggacaggggacagtgcaccaagcttaataagatattcaaatgaagatgccaatagcattcacagatgactgctacctacctatcctacctttcgtgattcaagtacatttttggtaaactctctaatagcagaaaacgagcccaatcctcctggacgatatcctgaaggcaagagcacaaagaatgtagagcacagcagcaacgccctaaagctagcgttccaagtccagaatggccgaagtattgataacgaaaagaaaccgtgtcactaaccatcttcagagaacctcgaagctaacaactgattcttcataaggctgcctcggtggttaacgagagaaggataactccatatagtaaataaccccgggacgaagcgcatgggacaaggtatattaatagcttgccaaggaagatcagcaagtacttggctccaacaggagggcccctttcaaggaaaatgatagggacaaatggcattaatatgtcatcatatatgctctagatctattcacacctaaacaaaacataaacatatagcgaggggaatagagaaaggagtgtgctaatgtacaataatgttacagacctcttcaactccgttgctaaatgttagttgaagatccaaatcacaacgcctaggctcccattataacgcaatcaaaccgtcaagacatacttgaatcactacgtatcaggcatcagacttcatatgatcttcggggcaagcggcctcttttccactgctgccactttccgcacgagcgttgttagaggccgtggctgatgcttgcatagcagccttggagttggcaggtgtcgtttttgatgcagcttgagctgcaaccgcagccgcattctccttgaggcgtctcaggcgttcaggtcggccctcccctgggagacttccccataccggttcgattgaatcggcacgccagttagtccgattcccaccgagcgcgctgcgcttcggggagagcggggagaaggtggagcctcccacgccggattcaccccacatgcggacgcgttgaagcttgcgcagtttggagagaccgtagacacagacgacaccagtcagagcaaagcagaacacggagacagccccaaaaccgaaatccgattcttcaatgaaattcttcaagttcatgccgtagagagcggagaataatgttcctgttgcgaggccgagtgttccaatgctgaatttgagatccatgagcatgagcgagttgcggttggcatcaaggatagccttgactctgagttgtgttagaggtgctttgcatatcatgaacgattcaacttacacttcttccgtattgcgaatactcgtcaccaagtttccactggcctgaacaatctcatcgcacactttgtggtatgactccagaagcatttccacttcttggtggtcatcctcttctcgctctttgccgaccgatctctcagataggtacattgctgctaaatcatcatccgcctccagcaaatcatcaatggcatctcgtaccaggcgagctttctgctcaaatgtacccagtttcttggagtagatcaagagatgccggagcttatctcggtcaatgtcctcctcgagtgcacgaagaacccgcacaacaggatctctcactccattgaactcctcttctaggccactcgtgacactaatgaggacggcttccagcgcgcgaaactcgtacggtagcggttgactggcaccctggggttgcctttggcggagctttccttctaaatcgtagatgaacagcgattgcatgtatgagtctgttgatccatacgcgtcaaaaacgagtacccggtccgctttgatgaggacgcgcagatgcaatagattgatgagaattgctctaggtcgtaccaggatatgagggagagtcgacgaatcaatcttacgtagatctcggggaagaaggccatactgaatcgtgatgcaccggttagcaaatgtcaaactcagactcgagacctttttaccaaccttggcaatcagctcctgcttccggaactctccgttaacgagtgtaacgtctccattgatatcaaactccgtgcatcgaattcgcagttcatttgacgccttagctgatatgctgcggccaatattaaacatcccctccgttccctcatccataagcccagggccagccgggccttgatccttgtggtcggaagctttatgccgcttgaggccaaaaagccgtcggagaaagggtcggcttttggttgatgcatgacgcgagaatttcagctgcgtaggcaccaatggcggcggcattgttgctctagtggaatttggtcttccatactgagtgctgcatagtgtggtatcaagtgttgcggggctatgagtattgagacgcgtccagctcgagaattgtcctgtcgagaagcctttatcgcggctggcaaggcgcttcggataagcgcatgctgatggtacggctgagaacccagactgcgatcgtagaaagcgcaataaagaggcagaaggcgcagacagcctcggagacagcatgtctctgaattatcgaccgagctgtatcgcaagttctcccgatcagatcagatacgcatttttttcgtttcccggaacaattttgacccgagaatcagaactataactggaaaacactattcctcatatcttgtactatgagaattagaatattgattctatctacgtaccaaattactatcaattggtcaagtcaaattacttccttctcggctcagtgcccaatcaaccatcacccttctccctactgcattgattcaagtttgcctcaatcgcctcatagttgttgggaatttggagttggtttggctgactgatatgaggccaataggatccaaaagacggaagatagagcacagaatttcaacgggcaaagacccaagagagggaggattattacggtggtgtaacctaaactccactggccataaacatgtggaggcccccggtgtcattggactaagaaagagaatttaaaacatatacttcctcgtactgagactatctctcgccactggatctaccatgaaagctatatacaaagtgcattgcccctcttttgttaacacttgaagccaaacttttaggcaaaacgctggaccaggaagcagaatgctcaatgctcgcaagaatgcgcaaaagccaattgtatctcgaaatacttgaacagtcacgaatactaactgctcaccaatcgtcgtcgttgtctttctcgtcatctaccaacatagttagcatatagatccgcctttccgtgttgggattgacttaccacttccgctgactctctgttttcgcttgttgagagcatcttgcaatgcgccggccaaaccaccttgaggggcgcctcctgcgttggagcttgtagctgatgactcgttagcaccaccgggtaccaaagctttacttcgatctttcttttccgtatccttgaccttgcgcaagcctgcgcctccgtggccgccagaagctctgatggacgccagcagatcgctgtgtccaccggcgggctttggcaagggtggtgcagcaccacctccaggcgccccaggaggtggaggcggcggcggtggtccacctggtgcccccaaaacaggcgccggaggagggggagggggcggggnnnnnnnnnnnnnnnnnnnnnnnnnnnnnnnnnnnnnnnnnnnnnnnnnnnnnnnnnnnnnnnnnnnnnnnnnnnnnnnnnnnnnnnnnnnnnnnnnnnnnnnnnnnnnnnnnnnnnnnnnnnnnnnnnnnnnnnnnnnnnnnnnnnnnnnnnnnnnnnnnnnnnnnnnnnnnnnnnnngtcggggtgggggagggggagctgccgcaggagaagacggtgcagctggcacgggtcgaggcgctggggggggtggaagtgggggtgaaatggggcctctggcgggtggaggaggaggcccagttgtaatgctcatgggcggcactttggggggcagttggggtggtgctgctgggctcgccgtgcgaggcggcggaggaggaggtccacctggtgcagggctacggctggggggtgccggtggcacagacaccttgcgatcaccagagaaaggcggtggtaccccaaatcgagattgactcgattgaatatattgactatcgtccatcggtgtcttcggtggtcttggcggcggcggaggcccagcattgacgttcgaagttgcgcgtggacgccgcggaggcacagggccagcgggctcagcgaattttcctgcgtctgcaaatggaggcggcgcgttgaatcttcgcgcaggcggagatggctcacgggggagggaaaccggttcctctggtgcttcagaacgtgttttccgtgatgggggcggcggcggtggtccccttctgcttgtcgagctagaacccgtgtcttgaggactgatcgtggctactttcggagcgggaggtgcagaaggtggcggtggaggagcagcctttggtttattctgatcctcagcagggacagactcagccgctgccgcctgcttctggtcaatccaagctttgatgaattcggaattctcagcgatttggtcttcggtaattcccatccccttaagctcatccagcaaacctttccaagaggggtcactcgtatcaaatggcaaatccggcttagctgatggtgtgattggggacagtgtcagaggtggaggagcaatctgtattgaaggcgcaggtgctgtcggcggtggtgcactgggagttgggctcgaacgatgtaacaagctgccaaacaaagaccgtcctactttcccattggtaacaggagcaggtccctggcctcgagtagatgcgaaaggagtcttagtggtctctttacttgcatgtttctcgcgctcatgcaccttcttaataaaggtcttggcctccttctcgtcgacaaaggacaggccggcgggacaggcttcgagctcgaatgtatgaaagaaggttcggtcctggttgtaagcgaagttgtcatagatctcctgatcccagatcacgcccctgccagtgggctgcatgcaacaacgcattgtcagcacatctactcttatctccaacagcagtatggaccgcttaccgagacatcgactattttaagccaaaaagtccttcccacgaggtcattgcagaggacaacagccccttgaattccggtatatgtccatttctgtccatccgggtaggcgacgtagagtcgcgcgacagctacggcgaggatcttgttggcgggtttggggacattccgcttaacagtttccttgtcggcatcactgaggatggagggcatggtgagtcgagatggtcccccactaaatggagaggggaaaggtgatagttcgaagggtggttacgtgagtagagcacacatccatggatccatggattgcagccgggcgggtatcttcgaatgatggaatagcgccaacacaccgacggacacggtagtgggggagggtacagggtttccttataatcgattgattagatccgaaggccggggtgttagagaggagccgaccggcggttgccttagagagttggagaggatgaaccggaggtgagaaggcgtaggcggggcgcaatacaccggagtgacctggccctaccgcaacaccgccataccggcacgtggtacttctcttgtactattcaaagtgtggctacactatataattgtttgatagtctttctatttgatattttgatgtttcaaaaatacaaattgatagaacattgctgacatgatcttcgtgagtgacgaggatagcgggatgcggtttagcgtgctcgtttcaatggtgttctatgtcatacaagaaggaaccattttaaagatgagctagttaactaagtgaatatgcggtgtgtcaatatggctgaccagaaataggatgtatgcagcatattaaatgtatagaagacctcgggaatattctttggactagcaatacttatctatcttgttttgactatatatatccagtatcggctatgtttgttgcaatgaggtttatattgcatttcaatcaaatcatagctaccagtgcatgccccctaagttatccccggtacccactaaacgtagccatcaaatcaaatcatattgatatgttgttcttttcccctcatacgtgtctaggcaacttctatcatgctatttgttgcaattcgaccaccgacgtcatccctcctgagatctataaaatagacatccaaccgccgttcaacacttgcttcctcgactcaccatcaccaagttacaagatttatttgttctatttaccggcgaacaagagctagtattagctagcgactactcaacaaggagctcttctatatctccaaaatgccggtcatccccgagtcgtcagacttcccatctgctcccgaaaagggaagcaatgaggccgagaagaaaccagagaaacaaacccagaaagcgaccgcggcggacttcttgtcaaagggacctcagattccagacagtaagttgggaaccagacctatataggctcgcgactgacactttgtagatatgcctcccaaggcttcgaaagaggagctcgaggcacgcgcgaaggaactgaacgagtcatccaactaagagacccttggtcaaaatttttattatctatctgtacttcattcagtagcagtttctggcattccaggcaacttgtccttgtcgagtgtaactatctatagcgggggtcatgacccaaaactagctccagcaccaacaaacgaagagtagctgcctgagacttatgaaacaaaccaaatcaccaaaaaaatatactattttttatttttcttgtcctcaaaaaggctgcgtatacttccaagcaaccttggaaggacctgaggtcgttcatcaattcattacgtcatacatcatagcaccaggacacgtgatcgcgcgacatctcattgaccagaaccctcattcctcaacgcgttaggaagtgctcccaatgcctccagaacggtccaatgtgccggtgaagctgtctctaccactggtaagtatcctatcaactcggcccaggcttcccgctaaccccccattaagcaataccagcaagagctcttcaccgaactacgcgccgaagatgagctagtcattcttgcacgaggcctggggcttctacacctgatatcaaacctcctccacttttacgatgcggcgggaaacaacctggtcctggtggtgggtgcagatgaacgcgagaatgagtggatcggagagggtatgtggattggtttacatcccaggtcggatgctggggttggaagctgatggatcccgaactcagcattggcggagcattatgctaccagcaagtcccccctcggcagggggttaaaagtgatcaataccgagaaagctacggtgccaatgcggtgggtttctcggttctaccattgtcaattacggcgtattgacaaactaccagagaaggaatatatggcgaaggaggtattttgagtgtgacatccagaatattggttgtagacttgttgtccagtatgtatgctagtataatggctcaaatcactagctgatctttttagaacttcttgatcccgagaaagtcaccgggatggtcattttgcatgctgacaaggttttggcgacatctcttgaagcattcatcatcagggtttaccgacagtcgaacaagagtggcttcttgaaagcattctcggactcaccggagccattcactacaggctttgccccgttggctaacatgctgcggaaccttttcctacgcaaggcctccttgtggcctagattccacgtttctgttgctgagtccctagaaggaaatcgcaaggcagaagtgattgagttggaagttcccatgagcgacaaaatgagggaaattcagaatgctgtcctggaatgcgtagagatcagtattactgagctcaggaagagtaacaccgggctggatatggaagagtggacgttagacagtgctttgcacagaaatttcgatatgataatcagacgtcaactagacccaatctggcatcgtgtgagcttcaggacaaaacagatcgttgccgacctgacaagcctacgagcagtccttcagtgtgtctctcatgcgtctttccctttctctatactaacagctctgcagtgctttgctcagctatgatgcggtatcttttgtgcagtaccttgatactattgtgtctgcgcatgctccgcctcccggctccaacagacataattactctccgtggcttttccttgatgctgcccatgttcttttccagacggcgaaatcgcgagtctaccaaggcaaattgaacaacgaactgactcgcctttcatcttcaactacattttcttctgagttgaacccagttctagaggaactcccaaagtggagtgtcctgtcagaggtccttgcagaaatcgaacacgatgcttacctccatcctgcgagaatgcatcaatcaaatagcaccatattgattatgtgtagtgatcagcgaatatgcacccagcttcgcgagtacattgccaccatgcatgcccaaattgcccaagggtccgagcccaaagaacatgatgatccgagtgatgacaagccttctgcagagcttatgatgcggcgtcggctgcgagactatctcaattggaagaggtctctttcaaatgtcaacaagaatttgtctcagtcaggcgaggacgataggtccggaaactccgagtcatcagcggcccagagtgcgcatcaaggacggcctcccccaaacaaacgtcgtcgagtacgtggcggcggtgcagttacctcggctgcaggtcgtgtgccaaatagcagtgtccaaaccgaagtcgaattgcccggtcaggtcatcagcttactaagtgagattcagcccaccggcgtggaagaaacgcagaaagaggaggttattatcgatgagttggaggatatggaagatttctacgaattgtatgatatggacgatctggtcatgatacacccttacgacggtgacatggatgagcatatactcgaggaagtgcgtccgcgatacattatcatgtacgaacccgatcccgcattcattcgaagggttgaggtatatcgcagctcccattcagggcgaagtgtgaaggtctacttcatgtattatggtggttctgtcgaggaacagcggtatctgagtgctgtccgacgagagaaagactcattcacaaagctgatcaaagagaagggggtaagctaccctgctgcatccttcacactgttaactaacctgatcttcagaacatggcagtcaccttgacgcatgacaaaaaggctgaagacccccaggagcaattcctccggaccgtcaacactcgtattgccggaggaggacgactggcggctacagcatcccctcctcgggttgtagttgatgtgcgggaattccgaagtgccctaccatctctgttacatgggaacaacatggtcgtaattccctgccagctcaccgtgggtgactacattctcactccagacatttgtatcgaaaggaaatcgatccgtgatctcataagctctctcaagaatggccgtctctacaaccaggccgagacaatgctccagtattacaagagcccattactattgattgagttcgatcaaaacaaatctttcacgtttgatgcgttcgcctccgttccaacaggtcccacgtttatgacagattacggtttctcatcttccggcactgcaaccaccactagcagcagctcgcttgccaacccgtctaacccaaagtccgctcagcatctaatagtgctccttactctcgccttcccacgcctgaagatcatctggtcttcgtccccttaccagacagccgagatttttgcagagctcaaaaagaacgcccaggagccagatccactccgcgcagttcagctaggcctcgatattgatatatctcattcgcttggctctgctgacgtcatggctgccactgggattgagcaccgtaccttcaatgttcttccacaagacatgctgcgagctgtgccgggtgttacgccccaagctttagagcggctgataatcgaaacggacaatattagtgatatcgccaacatggatgtcgagcagctggatccactggttggcaaagaagctgcacgtaaaatcgttgctttcttccagagaagcgtatttgattaatggaggattcattcttaatcaaatatgactttgatgcaaattaaataagttcatcaaaaaagccctgtatgtcagcaaatgcggtaactaatgtgtaacaatgtaacaaatacaactacatcatcccatcacatcttcatattttgcccaaatcagccagaaaaaaacaagaaaaacagcaaacagccgagacatccgagttctggactcttacggagtacagagtaatcaatttgaacctggtctactccgtaccccgtcagacttcttgtccgtcttggcgacgatcgtgcagatcagctaaaaacagaacagcccccagtcaacaacagccgaagcaaggacccctgagaaagagtggggatgtggatgagtccttttaaggtcagaaatattatggactcctgacgccttcaacttatcaccatgcatctcaagactgtgttgactccgatcgctttggctgctgttgtcggtgctactaggagtatacgcgatgttgagccgtgtgctcaggttagcaagtttgtggaagaggccaaccgaaaccagagtacgtcatgagctcgaaattatcaaaattatcaaaattatcacttggttgataactaacggtcgcagcaaatgcccttgtccctcatgatttggcacaccaatgtctgctatctatgccctttgactcgaaccgcgccgttgatttcttgaatcaggttcgaaagatcctcgagtttcagtcgactatcgatattttgaagggtaagtgatatcaattcaaatgagaattctttaacctggctaacctgtatctgctagatcctccatcgggatataccatgccctccacggatattatggggggaatcgatataatcatcgacaaggccaagagcaatagctataccagccaatttgagatggacttggaaatcaaccaccttatcaaaacggcccatgacggtcacctggccttccagctatgctcacagtcaatcttcacatatcaaatcgatatgcctctagtgtcaatttcaacagatgggctcgcacttcctcaagtgtacgtgttaggtatgttcagaccggtatatatatcaaaaatttgaactaacatgacaggcgatgcaaaactgcggaaggtcgacccggacgccgtctcgcctctggtgtcaatcaacggcactgatgtggctacgtaccttgaatcatatgccaatgatcaaaatctccaggattgtgatgcacagtaggtgtccttctacagccacgacattgaatcacatttaactgtcgcaggtacaatcgagtgttccccgcgccagcccgtagtgtcaccaacactcctactagtgtggatggaatctgggcttccattggagactggactgatggcgctcagctgtccctcaagtttggtaatggcactgaaaagattatccagaaaacagccacaccgagcgaaaagttcttttcttacgaaaatggcacacacctctacgacatagagtgtcttcctcgagacttgtctacagcttcgagcagcccatctggcgctgagacagcctcctctgagataccgggatttcccagcaccacctggcgtaattcagctaattcgattgctggatactactctgaattatcagagctggagaacacagcaatcatatttctgcctacgttctcatctagcgcatcagaggtcgctaagattgcggttgacttcttgcaaaacagcaccgaatctggaaagaagaacgtattgattgacctttcatctaacccgggtggatacatgtctattggcatcgacctgtctcgtatcttcttccccaatgctgctccatacacagcgacgcggttcagagcacacgatgcagctaagtacctcacaaaggcatactcgcgcgacaacagcacggacacaagcaatgtttttgcgtatcggcagatggttccacctgaccagagcacggacttcagctcgtgggaagatctctatgggccgcacgaaatcctgggaagctctgcttctagcctattagccaacttcaactacacctccacctctacagaaaactttcccattagcggctacgggcctgttccattgaacccaagcaaagcacccttctcggcggataacatcgttattgtaagtgatcgtttctcacaagaatacagaaaaaagagaacaaactaacacaaactcaaatgacagatcacagacggcgactgtgtctcgacttgcgcgttctttgtcaagctgatgaaacgccagggcgtccgcactatcacctttggcggccgtccacagaatgcacccatgcagggtgtcggtggcgtcaagggcggccagtcactcggggtcaactatatcaacggatatatcgagcaagcgaacgggctgattgaagactcagtcaacagtggatcgccactgctgacatctgccgagtggaaggcattcaatgagtccaagccgagcacgacggcatcgctccaatggagtggcaacctcaatctgcgaaatgagtatgacccggaagatagtcagacaccgctgcagtttgtttatgaggctgctgaatgtcggctgttctatacgctggataattacttgcaaagggagaccgtttggcaagctgcggcgaaggctatgtttgggagtgggcagtgtgtagagggatcgaccaagggaaagggtagtctggattcttgatctattgacattctagcagagagacatacatatcatacatagaaattttgtaaaaagatatacatacctggcctgtactccgtacatttgctgaaattgcccaggtgactgtacggagtaggagaatcacaactacgtgcagcacattggagaaatactatttaccaacctaaaccctcaactactttaggcatagcgcgacttggctgccattcgcaccgccgaattatggcagatctgttccaggtagtcacgtgacgcccctgacgttatcaatcacatctacctacatatgtccgtcaacgtccatctgcacgcgtccttacatcagcgctgcctgagagcttgacttctaaggttaacgatctgaatatcttctcgacaccatatctacaacccaaagcttgacagcccagcccatataccaacgtcacaatggatagaccacaaaaaacggaaggcacgatgggagaggtgcgaacgtcgagtcttacccaggtccacaatcttctggccccttttacctacagagacatgatctaatatacctcgattcgattaatcgtaggcaaacctgtcaatcggttctaacctcgattctacctctgcgtccagaggctcagagaccactacaactacgcccccatcccaatcatcgtaccagccgtttcttggagagtcgaacgatcttgtcgtgccccctaacgcaagaataattcgcccgcgctccctgaatgatatctacgacgcaattgaagacctaaaggctgaattagacacacataccgtcgagacacataccccccgaccatcacaatttatctgggcttatcaaattccgcaaggcctctttacccagatagaaacagaccttgaactctttcccggtgttcgaaccacgatcgcacacaacgatttcgctgtattattgaaaatcatgccgggtcgtcagcgtgaacgaatcactgggaatttccgtgttatcgttatgggccacctcaatgctatgggcttgtccttgcagaacggagatttcactgaccaaggcgccgaaataactcgcggatttctacaaagtaaggagcccgattgggcattcggtccgtacgacgcacgtatcaattcagcggcagacgaatatcctgccaccgaatatccctccctcattcttgaaactggcttttctgaatccttgggccaactccaactggatgcccattggtggtatagaaataccacccaagaaaccaaaatcgtcgtgttaatcgatgtggcaagcgacaatccgtaccgcgtcaattttgaagtttggactgaggttcctaaccagtcccatgcccctgtaaccagaaattgtccggccgaagttgttcaatgcacccagagagcgacattgcagaacggggtggtcacaggtggccctttgattcttagtttccccactcttatgcggcgagcgccgcgggctggcgagcacgacattgttctaggggctgctgatttggcgatcatcggtgcccgaccacgccctgccccttaattttccggcatctagcgaaggtgccgaacctcatcgcagcaacgacggggcggccaacaagacgatggtccctccactcggaacagtatctcaatttgttaacaacgagggaattacttgatgcctggtgggttgtctgatataaacataacttcttcggtccaaccatcaaatgagaggataatactccgtcgataggtagcaattggcttcgacgttgggcattgacctaaagataactacgcaaaggttcttgctatccgaatacgaataatccagggggccctggaccctgttatctcctgtaaagtcaatgctccttatataactacgtctttgttctctaaattccaagttgtgctgcccatgcaggcggctctatgtgtagtggccccatcaaaagcccctgcctgagaacccccaaagtttagttacgatagttcacttgatttgtctaattactgctttgaattggtctacaagtaaaataatcttcaaaaaatattttcaattctcgtggcccatttcatgactcttatcataaaagaacgaaaagaaaagcaagtcgaggctgaacagagtgaacacaccgcatgcaatgcaatgcaggaaaacaagcacacaggttcatgatgtgtgcatggcaatcattttattctctgtcatgatcccaagatatttgcacaaaggacaaaaatggtatcgacgatcgatccaccttggaacgccaatggagaaatacctagggtcctctgttcgatggcttcaagcccgtaaaagttatcgcagtagcgccagaatggagggttttcccatcctcatgcaagccgaggtgaggagcagcgtcgtaggccggggaggtggttcatgctcttggtccgttcgaacgaatgtatagagggaatcggatgtcgaaagtgcctcgcgtggcaagtagtcaaaggcagtttcggagcagatgagcgatggcactgtgtccacgacggcgagtaggaggagagggatttggcgaacatggagaataccgaggaggatgtatccggggtatccttgaggggcagagcatcgaactctaggggtagcaggggatgagcttagagctcgtcgacatcgatctccttctcgtcctcgctttcgcggtcctcgtcgaactcaacgttgtcgtccaagccttcaccaccgtaggtatcggtctcgttgatcttggcgtgttcggggagctcgccataagcctttagagaacgggcctcgtcggcggtgtacttcatgataacatcgcctttctcgtcctggtagtcacggagcgagaggagaatgatatcaccctggttgatccagaccttcttgcggagcttgccacggatgtgggccagacgcttctcgccgtcgaagcagagtgcctctaggcgaccattgcctagcattttcacgacctgagcgtactcctggccctcctccttgaagacaagttcacgcttctcgttgtcgttctcattcttgccgcgacgacggttcttaccgccctatacttggttgtcagcatgtgtcacacaagtgaagatcagtggtttccaaagtgaaaaaaatatttcgcgagcccacaagtcaccagcttgagggtaggtggctacccgagacggtggatgtggcgaggaaattatcaccaagaggaggggctggatattttgcgcgcttacctttcccttattcttgggcatagcggtttttcgtgaccttcacctgggtcaagtctctggggaagattttttccttagatcaacgaagatctgaagaggcctaatcgaggttgattaggggagtgagagtggaagaaagaaggaggtgggggttctgtgcactggtattcaaatcttttttattatgtaatcaggcactggctgcccagtggcgtcacagcgatttcgcccccgcttaactacggcaaatttatgccttgatgcctgatttcggggtagattttgaccgcctggtttgatttggcagaaaaggatgagtgtcaagcttggaagtttgcaagggcatttctgaggaattctctgaggtgttgcgataaaaggtgctgtctgatctgtccaagatcctgagtattcacttcatttacagctttcttgccctccgtgcgacccgtcctaagaagcagcacgagactgctttattcacgcaagctccgaagattcggcgcctgccgagtacattcacaatacatctgtgatacttctcttcgtggctcgatggtatctttttgaacctatatcccaaatcaccaattgttcctccgaagtgtccataggtcttcgccggctctgtttaatcaaccttaacgtgcaacccgacatgatatcaatgtgctacgactctcgttatatttcacagtccaagccagcatacccttacgaccaccggtaaacctcttctatcatggcgatgaaatttgtcacgtctacaaatagcttggtgcttcggtattggcccaaatgcaacacccctcctgttgccgcacgctacctgaattctcccacccatgcgatccggcccaaaattgtcgatctctgtggacatcgtgaaagaaacacactatggtggcgagtttccgtgtcacaactccagcaaagcaagcgggttgttcgctcttggtgcgcgcgcagagtgcgaatggctgtcgagcaggctttaagacagcaaggattggataagctggggaacccgcttgtttctgaggctcctttgcgaaggagaaaattgtcaggaaccatggacatctacattcagccgccatgtgtgacgcggaacttagagggggtccaaaaggatgcagatcatctaatatccttgcttctggatcatgaatcaccgaggaaatgacctattgtcgatgagctacactcagaaagcgaggcctagcaagccgtggacatcatgcgactccgtgagactcaatgtatattaccataacatcttgtatcatactactagcagtcgattgttggactgttattgtacatcattaggcgacattgcgatttatagcatttggggggaattagtttgcatctgagatttaaattatttcaattcctgatttttttcattctttatacctccaatttacaactaagctgtcgttgttggctccgaggtacagaagtaaatacagaagcgcgtatctcgctaaatgccgatctggcggaatcaacgacccaggtctaggctaagattcacttgacaaccaccacaacttttcctaaaccttcccctcttcctttttttcgctatgttggtttccttgacagttggcaaggtagacgcgggtgtcgcagtgctcctcacccaggacaatcggctcgtaagctcaaacccctggtcccttactccctaccccgaagatatcgacgacatgcaattctgcggaacatcaatagcaaacaaacacaccttactgacaaattctccgcgcagatcgaattcccctcagtcctccttcccagcaacattagctcaggcagcattgtcgatatcaccgtttcgcgcaaccacgctgccgaagcagcgagcgcatctgccttccaatctctccagaagcggattttaaatacgtacggtgtcaaggccccgtcaccccccatcttgcgcctccgaaatgcgacccagacctcgctcgttctcgagtgggacccaatcgacctagccactgcatcactgaaatcgctctccctttatcgcaatggttccaaggccggctgcataccccgcccgctagagacacgcagcacaaaaatcagtggtctggccattcactccgagtactccttccatctggtcctgcgaaccacggctggcacctaccagtcggagaagctgacgtgtcgcacacacaagatgactgacctgtccggtatcactgtcacaacgggtgtactcgatccacagcagaaggaggctctcggtgctgcattggaccgcattggaggcaagatgatcgactcggtccgtatcgataccactcacttcgtctgcacggaaggacggggcgcgcagtgggagaaggctgtagagatgaacattcctgtcgtggtgccggagtgggtggatgcttgcgagacagaggggactattgccggtgtgcgtggctactatctcaacgcagatcccaaggcccgtcaactcggcgtgatccacggctcgtcccaccagcgtactacttctactctttcgactgcgacaagtgccaaccagggaaggcccagcactcagccccaacggagccccgtgccagagcaagtacccgaagagcctcctttgactccattccctgggggtgagacgagtagccaaccgcaggcgcagaggcagacacaagaggttggatcacaacatgagaaaaacgacatcctgcccccttcacccccgcccaaagataaagccgaagatacagatgagccttatcaaaatggtcaggcagaagcggcacctattccagaggcgaagaacgaggagcctgaacccgaaactgcagaggagagcaatgaagagacagagaaagagcagacctttccacagaacaggcccgagggtgactccgagtcgacaaacctcggaggcacaaagggcaaaggcaaagagggcgagagtgacttcaacgaagttcctctctgaatagccccctgatgatttattctgctctatccttgcttcgcggtcaatctcttaacacccctaccctgcttttgtctcagttgtcgaccaacgtctacgactttatctagtacagttttactttgttgcggttagtggcgtttctcacttgagcgaccaaaccataggattcttacgaacgtattccgactgtgattcctcatttttttttctctgtttcgtgtttgctgttatatgtacagtacgcaattttcctaatgcagccttgcccattgactcgactgatccgatctgcctagatagctatttggagactacctaagtggttacattgcgtaaggacaccaagcctacacatgtggctatgttctctaaattggaaatatcatgaaacgtcataaatgagatgggcacgccagatgcaaggtaaatagtagcctgcaaagaaaaagaaatatcaaccccttttgagaaaccaaaatgcatggcagtctaaacaatatagaattcaaaacaaaaccagttcggactccgttcgaatttagttttcgttgcgaataacatcgtcaatcgcctgtgcgacgtaggcgacattcttttggctcactgtgcacaatgtcagttcgtttttatgagtatccgtgattgaggttccttacggccgctgatagatgctcggcctgacttgagcaggtaaatgtggtatttgtccttcaatgcgtagacttgcttgggggaaagaccggtgtaggaaaacatgccgttctaaaagaacaattagtacaaagtatgttacacatatggtaaaatccagatagcttacctgctggatgatgtgctcccaagtaccgggggtctgcagacggaccagttcattgtatagagccttacgcatggccttgatgcgcgagctcatgacctgcaagtcctggttccagtcggcagtgagctcatcgctggtaagaaccttcttcacgatgctgcagccaacacgcggacccatggagaactcgccgcgaatcaggtggcataggttgttcacaacgatgtcccgcagggtgactgaggcgcggttggtacagtagtggaacgcaccaacacgctgaccgtacaggccgaagttcttggagaagctctgtgccacacacatctccatgtccggcttagtgttaaagaagtagcggacggcccaagcgtcctcctcaacggaacccgaggcgaagccttggtaggccgagtcgaagaaagggaagagcttcttgcgctcgcaaaggtcagcgatggcaacccactgctccttgttggggtccaggccggtggggttgtgcgcgcaggcgtgcaaaagcacaacatcgccctcctgtgcctcggactcgagagaggacatcatgccctcaaagtcaaaggaccgggtttcagcatggtagtacgggtatttcttgatgggtacgtcggccagctcccaaatggtttcatggttagcccaggatgggtcggacagccacacgttagtgggcttcatgtggtgagcaaggaacagggcgccgagatggttggcaccagtgccagcaacggtctgcacggaaccaatgcgtgccttggcctcttcttcgccttgcttgccctcaaatccaaacatcagatcccgcgcgatccctaggaaaggcacgtcgccctcaatcgcagtatattcgtggcggaagagatcatcgtctcccaccaactccttctcagccttttgcacgacgggaaggggccatggctttccatcgtctgtccggtagacacccacgcccaagctaaccttctgcggatggggatcgactgcgtaggccccgttcagggcgaagatttcgtccggaggcaccggggagacgttaagacgggtgtcaactttggtcattgtgatgtatatacgctgcaatggcgattcccgggagcaatttctgggcaatatgtaggtcgcggcgagtataagtcagtaaagatcagaaccttgtgatcgcccgctgagtcaacccgatatcgccgtctgtctttttgccccacatagcggattccggggtcgggttgcttggaaggacgcaatttgcaatgccttcattttcgtttaattcaaagttcaaaggaagagatggccttcaatagtcttcaagttttggccatatgctgatgaacagcctgttgagataggttattgatcttatcttggaggacttacctctaaacaccagcatgaaacgtcatcggaggtctgctggcgcgcttgtaaatgcatcagaagcactgttattctcaaggggacaaatatgagtttttcttatgtagcaattcaaacggggtcgatgataagtgatgtgttgatgggaatacttgggagagtaactattgggtggagataaacgcgaaggtatgagtacttcttctacaacaacattctatttatgtttggctttacaccctcaatgtttctattgattccataatgtgggaaagccaaaacatcttttctacgatgtacttcatctgtctccggttatatcaagatatgaaatgaacaggaaatcaaccaaacacactagaagaaaaagcctgttgagctagtcagaacttgccagatttcgttcgagctattttcccaatcgatcctttgatatataaattgcagccggtgaggatagacgcttgaactcggagttatgctacgtaagtctctccgcttcgacggtgataaaatatattgacacggacattctgtgcatatctacggagtacatagttatgttgcagttagttacgtgggggtagactgaacttggtacttatgtattcaaatggttaccccgcgatctgtagttactaagtggacttcggtagcctgcttttctcttccatatcctattctttgaacaatccattggataaagtagccggtgccatttttcgttatcaacatggcctctcaaacagtagaagccggtgattctgctttgcataagtttcaggttccaactgttgtcctgccacttcacaacagcattcccccggagctgctacctcggtatgacccaatctacgtcgcatactataatgcatttaatgccgggcgactgcatacgcacgagatcccgattgaagagttccgcaagaaccctgcccgttataccatttcctatggccgagctcccggccctgatatttatcgcatcacagaacagaaatgtcctgtccatggcggtgaaatcaccatacggatatttgagccagcatcccagcttgacggacagggccagccgaagaagagagcagcctatgtcaacttccatggcggtggatgggtgtttggtggactagcttacgaccacgatttctgcaagcgagttgtccatggccttgatggggaccttgtcgcatttgacgtggattaccgactggcccccgagcataagtatcctattcctgtggatgattgttggacggctttcaaatgggtaggagtctcccgggccaagattttagatataaaccaggtgctaacgaggcaacatctagattcgctcccacaaagcgaccgagttcaatctagacccagataggttcgcagtgggcggcgtgtcagctggaggccagctttcggccgtcatcagccatctctgccgcgatgcagacatccctctgcgcttgcaagtcttgactgtgccggtgacagacttgcaccgggtttttactcccgaaggtgagtttgactacgaaggctgtccatatgaatcataccgagagatggagtttgcgccagcgctaccagcagcgcgcatggcatatttccaccgacaatttctaggagttcctcgaccggcggactctgacgaggtaagttccgacatgaacttgaactaattgaaaatgggatgctcatttgtctaggattggaagatatcgcccattctcgcaccgaacttccggaacttggcccctgcgttggtgtctacggcggaattggacccgctgcgcgatgaaggagaggcgtatgcggctaagcttcgagctgctggggtatctgtagaagtagatcgaattgcaggtgttccacatttggtcgctggactcgacggaattctggagggaggtcagcgatataacgagaaggttattgcgacgatgaagctgcggcttaagggatgataaataaataccataccaaaccggataatacacgatatgaccgaatattacgggcctcactgccgagcaacccgtttcccttcggtcctgccgataccgggaaatgccggcattgcgacttttctttaaaggagacccaatcctcgattccactctcatagaagcttcagaagcttagtgggaacctttgtatatcctctttcgtacagctacaaattcaattgtcacacaatgaattctacttcctcgcgagccgcggtgcgctctatggccaccctgacacatgcggccagagccacccccgcagctcgcagcgttctgtcgccctttgctacccggtctctgagctctaatacccggcaattcgttcagttcccccgccttcaatccttgaacactttctccaacaagcgttcttttggaactacagtcagaatggtatgctgcttagagggcgcggtagacaagcagacaaactgatgtgtgtgacctagtctgttgaccctcgtaccgagagcgatgcctttggtgaaatccaggtgagtgatattggcgcagcaatggtgccgcacagaactaatggggatttcaataggtccccggagacaagtactggggtgcgcagacccagcggtaagacgacccgtgaaatcgatatgttacaagggaagaaacgaacaaggtcgctgatggatgcagctccctgaaaaacttcgacatcaaccagccccaggaccgcatgcccgccccgttgatcaaggccttcggtatcctgaagggtgctgctgctgaagtgaacatgaagtatggccttggtatgtgaagctttgcgtaatcagatatcgtcaggttattgacttgcataagaccccaagattggcgaggctatcaagcaggccgctgctgaggtcgccgagggtaagttgctggaccacttccctttggtcgtctggcagactggttccggcactcagtccaacatgaactccaacgaagtcatctccaaccgtgctattgagatcctcggtggcaccatgggctccaagaagcccgtccaccccaacgaccacgttaacatgtccgcctcctctaacgactccttccccactgttatgcatatcgctgccgttgttgagctcgagcagtcccttctgcctgccctcaaggaactccgtgatgcccttcaggtgaaggtcgacaagttccaacatattatcaaaattggtcgtacccacttgcaggacgccactccccttactcttggccaggagttctctggctacgtcgcccagctcgaccgtaacatcgagcgtgtccagtcttctctccctcacctgcgcctcttggctcagggcggtactgctgtcggcactggtctcaacaccttcaagggcttcgatgaggccgtcgctgccgagatcaccaagctgactggcaccgagttcaagaccgcccccaacaagttcgaggtgctagctgcccacgattccatcatcgaggcctccggctccctgaacaccttggccgcctccctgtttaagatcgcccaggatgtgcgatacctgggctctggccctcgctgtggcctgggcgagctaagcctgcccgagaacgagcccggatcttctatcatgcccggaaaggtcaaccccacccaatgcgagtccctcaccatgatctgcgctcaggttatgggtaatcacgtcgctgctaccatcggtggcatgaacggccagttcgagcttaacgtcttcaagcccctgatgattgccaacctgctccacagcgtacgcatcctctctgatggcatgcacagcttccgtatccacttggtggagggtcttgaggccaacgagggacggattaactcccttctccacgagaggtatgctcttctgatccccccccttacttttgatggcaaattctaactgtatgatagtctgatgcttgtgacttgcctgaaccctgtaattggttacgacatggcctccaaggtggccaagaacgctcacaagaagaaccttactctgaaggagagtgctatggagctcaaggctctcagctccgaggagttcgacaagcatgtccgccccgagctgatgctggctcccaaggagttgtagacgaacagcagtgctgtcctgtgacattatagaccatttccgatagcatgtgtatactgaaaagaatttatgtttgatcgctttgtgttgtgatgcgatacactttttttgtatgttgtagatcctcaactttctttggggttataaatagcacgatcgcgaagccgatcaagaacactagtaaatcagagttgccgagatcggtttaatactagtatatccaataaccctaggagtttttcaatgcagaaataagcagattatgctaaaaaaaaccagacagaaagacaaaagaatccactatattatacgaagtatgtggtattaatagaaaagcccccttagtggcggtgtctcacctgcagggctgtacggagaacggagtacctgaacccttcgaagtcaagtacttatttcccatcttgaaaagttcgtcttttcacttcgaaactcttatatctctcctcagttatatcaaagttcacctcagcacattaacttcctcaattccaagtccgccgatctcccccggcccctgataaacaaccgccctcaaccctcaaccctcaaccctcaaccctccaaactcttcaactttcaacattcccactctccaactctcactgcaaaaatgaccgcacacgcccttccaagcaccacaacctccgaggccgtaaagccaatcatgagctcaaccgttacctcagtggacgagacggtcaccgacggtcccctcttcccctccaccctcatctcccctgaagtgatctccctcttgccaacagactacacaatccggccaatgcgccgctcggactactctcgcggctatctggacgtgttgcgcgtgctgacaactgttggcgagatcaccgaggaggcatggaaccagcggtacgattggattacctcgcgcaatgatgagtactacatgctcgtggtctgtgatggtgcagaccgagtcgtcgggactggcagtctgattgttgagcgcaagttcatccattcgctcggtatggtcgggcacattgaggacatcgccgttgagaaaaatcagcagggcaagaagcttggtttgagaattatccaggctttggattttgttgctgcccatgttggctgctacaaggtatgtgtttttttatctcttacgtctatacttatcattgctgacttgttgtttacagagcattcttgactgttccgaagtcaatgagggtttctatgtcaagtgcggcttcaagcgcgctggcctcgagatggcgcactattactgagtgtttcttgatacaagttttttttttatttctcccgccttgtggttcacgccggttgtttgatatagcgtttaggtcgttttgtccgaggattcggggagtcgccgttgcccacgagaaacatgcgcaaaccatgcgttggttgcatttgaaccccaattgattgtcattggtatggcccttggcacacaacaaggcccaattgggccatttgtaggattttgcatccaccctctactattggcaactcaattgcgcaccgtgaaagtcctaaggctggggaatgcttggtctaccaatcgtgatcatgatggtgcttctgccattgcggcgatccccgtcttagcttgtaacactactgatgggtttgtattatctgctttctctcgagaatttgaaattaatgcattgcggggatggagacctagatggtctgaagcatagatgtgcgtgaaacatgacaattatatatcattgttatccaacttgaaaaattattgtctggtcagaaatagaaggttcggtttaactatttgaaactaaacactgtttgtttcattcttgctttgtctccaggcaccctatgttataccttccgtatattcaacgcgaaaattttaggacaaaacaaaataagaaattcaatttagatctggaggtagaatctggattacttcgttgacatccgacagggatacatatctagcaacccatgagtaggcctggcagacatgataccccaggggaaaagcaagacactttccattgctggagactggataagaatataattttaatactcgcatgggattcattttttgattcctttgttcccatttttctgcatgaaattgtattgcataaagtatttccagaaacaaggtcaaggcccaaggccagtcctcacagacagtactccagctccgatgcccgtaagttccatcatatcgcaaccatcacagcactgctcctttccgaacacctccattcccaactatttcataaagaaatttagcgggacttggcggcgaccttgggagcagagcccttagcaccctgcttgctctggatgcgctgggcaccgcccttagaggcggcgatcttagccttctcggccttcttggcgctggcggaagcagccttcttctccttggcgtccttgatggcctgcttgcgagcagcctcacgagcctcggggcgttgggagcggcgctccttaatcacatcgagggaagcaccgacgatgccacgctggttcttgacaacacggcgggtgcgcttcttggcgacctcctatatatacaaaaagataacccggtcagcaatctgcagtcgcattctccatcatttgatccgaataatggtggtgacgtgataattcctgctcttgctccgtttcatggtttgtgcgtcaccattcaattcggcctttgtccctccacacaatctaacaataatccaaggagaggggcgaccgacctcagagatacccttgcggtgctggcgacggaagagaacagtccatgcgatgcggcgggggttcttgcgctgaaggaaaagggactcggactttccacgctggaagcggaagatcttgctgtcgccacggacgaatagcttgccctaaacattgaacatcaaagattagcttctagcggcaataagaaaacggcaaaattcatgtgcggtagttcggcaagatggagagcgacagttttgacgtcgaagagtgaatgtcgaatccgtgatgccgttgttccctcgcacaagaattcccccccccaaaagcgacgacgggatttgcaaacgcaccttgccagggtagatcttctggccgctgaaggcgtcgtcgtaagtacgcatcttgacggatggagatgcgctgacgggggtcggttggcgttgagtggttgtcgtaaatcgtggatcgcggtgatgttactgacccaattgtggtgcgggtgctcgctaaagtgcgacacgtgactacctctgccctttccgggtcgacttatcgataaggtcacatgatatgtctcttttttctagtacttcgattgtatatgatctctgatcagaatagttgcataatgtagttaactagttaactagttaattcgaatcgtattacatatgcttcaatttatgccttattaagagtgcaggtggaaaaaaatacatgaaaagacatgaaaatttcaaatttcaaatttcaactaacaaaaagcgcaaggaatttggaattttcacagataaactactcctggccctcgatgaagctgaatttccttcgagtctggactatagatgtggctggaaacttttgtggtagagcggctcaagcgaagtatgtgtataccgtctacgcctatacagctggagtaagtatcttcttcaatagtcctatcagagttcgatattagaaatggatgaagttgacatatatataattctcaaggtgaggatcacggctgtgcaacaagcgatatagtgatcagtacactgcgaggactgtaagtgaccggactacattagatgtatgatagcggatgcgttaagaatggccgatggaagtcaaacacgcgggcgaggttgacggtctgctagaaaaagccagaataacttgagacaagattaatggaaggagcagataatgtgatcctactcagagcaacagggttgcctaataacaaacgcttgtaattgaatgcctgctatcgcaaatagaaagggttatctgcacttcatggtcacatagcaccaacggacttagtccatagcatgtgtccgagtccattcctttgccgtttggatcgcagcaggctcatcgtccttccatctctgagcaacatcgttggcgagcgggtcatcgggattcggggctccgagcagtgcctgaatagatagtagaatcgtacgaatctggagagctggagaccaattatctggaaaaaaagagaaacactattagacatttccagtttgagaataaatcgaattgtggcttactcttcaagacatccaaacagatgcgacccagacgatcgatgttggggtggtagatcttggtcaagaagcgaattttgggtggggtcataggatagtcgtctggcaggaagagctcaagtcggaagataccgcctgtatatgtcagtacttcaattgacaggaagattttgtaagggcgagcctaccctcatatggagattgcgcaggtccgtgaattgagacgtcgaaatagcggaggttatcgtcatggggtacagcattaatgcctggaacactgtaacccaagcaagacatgttagctgccatgcaaatgaccttttgagagagaaaagctgcttacggctctgccatcagacgttccgtctccttaatgattctcttgggtaaagccatggcgaaccggcttatcgacacgcgtatagacctgatttgaggagactgttcctaaggcagaccaggaactcgcacacttttgacgttgagtgggatcacaatatgtaatcggaaaagtcaacagagaagagtaaagcgcaagttaaccaaaaaaacaatccagatctcgacataaccggccgaggggctcctgcatggcggggttatttcgcgtcccgtatacgagatcatgtgatgtcataatcccacagcgacagccacagccacagcaccagccacgctcttgtgcttatcgcgttatcgcaactcaactctccacatgtgcagttcttcgcgacaagtcgaggatataagtctccaaccatgaaacaatgatagcgaatgccaatgtgaaagatgggaacaggtgaatcactcctaaatgcatatatcgtcttccgttggatgcatggatatacctctgactcccccgttcatgcaagatcgcggcccgacgaacaccggagattaaaagagcggcaatcacagtcaccatgtctagctcgatggaaccgaggcctctcacatcggctatggagagcccgacgtttgaagaggacagctcctttcatgtagagcaaccggtgggttctatgtcaatatccccttgtggacgcgatgtcgttttagcatccaaggagggcctacatgtcatcgacctagactcgccatattctccaccgcggtatctccctcaccacacaccatgggaggtagctgatgttcagtggtctccattcgctgcacgtgatcagtgggttgtcagtacatctaaccagaaagcgttggtctggaatttggctatgaagacatggcagaactccatcgaaattgttcttcacgcccattctcgagcaattaccgatatcaatttctcggcattccatccggatatcttagcgacgtgttccgtggacagtttcgtgcactgctgggacctacgtgctccctcgcgaccagcggtctcattctcagattggtttactggcgcaacgcaggtaaaatggaatagacaagaccctcatgtcattgcaagttcccatgaccggttccttcgaatttgggatgaccgcatgggcgcctacccaatcaaatcgatcgaagcacataacaccaagatctatggagtcgactggaatcgtgttcgacgcggtgctgtagtcacatgttccttagatagaactatcaagttctgggactacaccaacgattcagatgttcctgaaaagcaaattcacacaccattccccgtgtggcgggcacgcaatacgccgtttggatggggtatgctcgcaatgccacagagaggcaacaatgaccttcacctgtacagccggcgagccgcagaaggctcaaatccagaggacgacttaccgttggtacatagttttcccggacacaagggacaagtcaaagagttcttgtggagaccgcgcggaggtgtagcgaatggaattgaccatcgcgaatatcaacttgttacgtggggaacagacagggagcttcgtctgcataaagtcaaccctgaaattctggcgcgcgtcgggtacgaaaagggcaagtcttttatttctacgcgaactgtgacacgactcggtgccgtatatcggagtttccgcgacgtgaattcagatttggatctcgatgacgttgacgtggcttcctctgttggccaccagaaccagaatatcgcggcaggtactgggatgaacgccattactgttccgtacgctcggggttggataaagggaggccatattgatcgagttggcatgcaacccaggtcaaatttaagagccgatacaaatccaattgcttggatgcgcggtgtaaagatctcaggctgggacattgagacattaggagatgaaatcagccaggttggtgaaaagttcactaaggttgcatttgattcagttgatgtccgacaaagaaagatttccatctctctaaatgggccctggggtactgacggggcctccttgtttttgaaggttgatatcaagtttccaacgagctatcccaagacggctatcccaacctttgcattccaaaagacggcagccgtcaccgatgagtgggctgcgaagactaccgctgaattgcgtacaattgctgagacctacatgtctcggaatcgagggtgcctggaaggtgctgtgcgttatcttttaggcgaaagcagcctggaggacagcgtcgcgtggatattgggtgaaactggcgataccctcaagtcccctaacaacggtgaactggaaggtgaatccagcgacgaggatgaagtcggcatgactcagagccaagagctggggatgagttctgagctactccgccctgtcaatgccaacgtcatggtgcctgtggccaaagtatgcggggcgctttgggcaaatgacggccgcctcatttgcttcttcccgccgaaaccaaagaaggataaatcagccgagttgttcgagaacatgggcttcaaagagatgactcgttggtctcgaggcgataaagtttttgaaggcttcggccggttgcataccaactcacccggcccacgcggaatcggaacgataacgagcacagatgatggtacatcggatgattcggacgagtcatactcggatacatcgagctcttcgggctcctctgacgtcctttctgggctaccgacacctttcccagcatcccgaacatggcgcagtgccggcagctatggcattcaccggccgcgatcaacagataattctcagcggtctactggaggtggtgccacagtcaaatcagaggcaccccagaatatcgtatctattcataatctgagtgatatgttacccgtcaagcgggagttagcgagtcaataccgcatctgtggcaaagggacagatgtatgcgcccataacgcggctgttgcccttgacgctggctgctacgaattggcccaaatctggggtctaatcaagttgatattgcatgttcgaaaatgccctggcactttgcctgggtcagggctgtcgcaaaggcgtacgcgcaaaaaagcgggcagaattggtgatcttggaaaagatgggctgtatagagacttgacgggcagtgttattcgctggggtgaccaccctcttggcagtcattggcttgtccctgctcttttcgaacactttgagcgcattggggatgtgcaaatggtggcaatgctgtcgtgcgtactactggaagccaaccaagagggatatttggagaatcagcgagccaaaaagacgcctgggagacaggatttctcattagattttcctcctgtcccatccgcaatttcaaccaagccaccactcgcgacgccagcttcatctgttctcaaagaggcccaggctatgcccccgccccagacctcgacacgctcttctagtgagatctggcgtctcgattccactcccccgtattccacaggcaccacgcctccattcatgtcccgtccacgaggcatcgctgctgatcgaaaaaataccacccacaatgtgtccatggctgcatcgcctgatcaacaaacccaagcacgaagtggatctgggtttggatcggtgctggcgtcctcattatctcgttcattcacattcggaccgtcatctgcgtcaccgccgacaactagaatggacaagaaaaagccgactcctcacaacagcccagttgtggcagccggacaagtggtgagtagttctaatcttgatttgagatgcctgcaaagtttgatctgtctgacctcgactgctctctagtcacaggctcagtccgacaccgaaagcgatcaaccaacggagcctacaccaccacccgcaagattcaaggtcacatacaagaaccaaattgcatttgaaagcgacggaccagcgcaagactcttttcttgacagagatgaggaattgctgtatcgatcataccgcactgcttatgcaaacttattatcgatttgggaccttcctgtccaacaaagcgaggtgacaaagattggagctgtggctgatcgagtggacgacttgacttcaagccattactggaacagcactagctccgaagagaccgcattgcaagatccacattcgaagccaaactctcaaactcttgacttccagcgccattgcgccagctgtggccacgcgttgcagctctccgtctttaataaggaacccctagccccgaataccccctccaagcgaaatcagcgcaaaccatcaggccgccgatgccctaactgcaagccccggcagccactgccaaccaaactgccctgcgtcatctgcggcgaggtgatcaacggtatgctgattccctgtctgagctgcggacatgtgagctgtttcgactgccaccggcgatggttccttcgaccggccgacaaattcgacagctcattcgcccatccagaccagaacaagttccttccaacctgtccgacaggatgcggctgccagtgctctgaacacattgccgttgatgtccccatgcccttgttagagccggtatcatcccctggtactaaagaatacgcacccatcacccagcacagccttgtacaggcgaaacactctcatcgtcgacagtctgagcccgtcggcttggtttctaaccgaaaagaggatccgcgccccaagggcgttggccagctcgaacacgatttggatgtgtggcaggactcgtcgccgtttgcatctctggcgcgcggtcttggcggtgggctgagtcgtggtttgcggacgaaagaagatcggaagaagaacaaatctgtcgccatggaatcgaatttgaggaattcttgatttttcgaggttggcgttgaactgtgtctatgattttgcgtatatccattgcttttgggggaagactttcaactacaaacaacttaattggacaatctgatccatgtgatggcactatccatattcatccgatgtttattattgttgtatatttcgaaagttccgggtatccattctaaccttcaatccgtagtataaatcttcagtatggaggttgataatccccaggacttccgatgcaagacctacggagaacaatataatatattcctgcttccacttaagagatggtgccaactgtgtctgaatatggttggatgcttgtcaattggcttgcccatgatctagatctcgattgaggcgttaagcacggacgactaatagtccattatcaaagcagcgcaccaatcagaacgaggaggtatagttcctagctgtactgacgttgtacaacaaattaaccttaagacaactgccttttacttagataagaaacggagagagataaaagaatgacctcgtggcttcattaaaagtatttcactcttcaggtaacagagcaagcaacagggcgatctaaaaattcggaaaaccgctgaaagcagaggggagaacaatgctggatatctgctaaacacaaataccgcagtccgactccccaatcacccatgaaacaatgcgccagtccatttacccagttccagtcttaaagaagtgaatctacaactgcttgaggacagcatcggcgctggagagcacgaggctgttcttggcggcctccttggcggcgtaggtgaccttaccgtggtcgataatgatcacgtagcggtaggtgcgtccctcctcgtcagcccagccgatgctcttggagaacttggcgtcggggtcggagaggaagagctaaataaaagacaggagtcagtcaattgagtccgtgaatttttggggggaaattggtatgggtgggaagaatgatagatcacatacaatatcatctccagtgacaccgttggccttgccccaggcgctcatgacgtaggcatcgttgtaagcgaggacggcgacctggtcgacacccttggcgcgcaattcggggagcttcttgatgtactcggggacgtggttggcggagcagacgggagtgaaagcacctgtagagcgggatggcggtcagcgcgagaacttgcgcagaaggcctagagaggaaggaggaggggattgcattaaagagcggtcacgtaccgggaagagcgaagaggataaccttcttgttggcccactccttggaggcgtagtagttaatggggataccgcaagaggtgatggcaccagcctcctcagaccaggggatgtaactgttggtagtctgttaggtggagggacacaattagaggggctagctcaattactcacgagaacaccacgtcgtcggggaaggcgtcaccggacttgaaacccttagtagacattttgaggatggaattgagtgtttgagtacggaagagagagaggttaagattgtggatacaagaagaagaggggaagagaagaagtccaagtatttaatatcacggctgacacatatcggcccatcgggactaagtggggactggctctgtaccttacaagagaagtgaggtgatccgaagaagaaagataccgaaccacatggattatcaagaaagaccgtcgagactgggcgttatctgatgtatattattcatcggcgaattgggcgagagatgagtcagcctggatcattggttacggggagggaacgtgtcggctattaagataagttgcctcggatttagtattcctggctgttcctagctgttctccggggttcttggagacacaagtccatttgtgtcattggccaaaaatgaggggccgaggtgggggatgatgttatggagtgcctgaaatacaaggcataaggtgggatgataaggtcaggtgatatacatgcctcaggcctacttttgtcatcacgtcacattaatcatatcaatccattttgcgagaaattagtaaacattctggactgaattctttgcgccacattatcatacccctagctaagtgaactccgcatataccgccatttcaaattcactggtcaattcctcgaatctggcatcagcctgtgatataacctgagtaaacgtcgcggccgctatacccttgacccagccaatccaccagaagagattgggtcgaccggcccattgtagcgtgcccgccgaacgtttcccaggaatggcatccgcgatttcaatacggccggcatccatgtcaaccgtagagcgtagggacgcgctggttcgtcttcgaggcggggctttttggtaggagcgggcccatcagcagctcctgtagatcactcgagccaatggtctgtggttagaagatttcatcgacgctggctttggagagtatggatccaccgtccgcgagcaccatgccgaggaactttgtccagtcgcgcggtgttgaccacagaccgtggctcccagacgttagatcgcataaactcctcgagggtggtattgttcattcgtgcgatggcctcgccggcccagtcggtcccagagccatacatccagccttgtccgggctcaaagaggagtggataggtcttcatgatttcctgtggggtgtcagatgcacatcgatacttgtggcgtacataagaaaaagatttacaaagtcattgtcaaagacgctgttagtcttgccattctgtctcgcccatctcgccagcggaggatttgaatgataaccacagccactttgatggctcattagcaatcgaagtgtaatggtcttagtccggggttttatcaagcatcggccctccgaaccgacaccatacagaaccgggggagcacacagatccggaaggattggagctatatcatcatcgagggagatctgtccgcgatcgacacaaatcatgatggcgactgtggtcatgagcttggtgagagaggccattccgtataccgcgtcaaagtcaactttcgtactggaatcctgtgacaatgtgcctttggacagtgtatagagttgttcacctgtgatcgtgatcagtgagtatatccccattcgagatggaaattgtatatacgtacccttcttgttgacgactgagcatacataagaatgcatgactggctttgaatcggcaattgctcttcttactgaccgagagaacttttccatctgagatccagccgaaccactatctataccactggaaccattcataccagtggaaccgttcacgccattagacacaagagattcgtttggagattcgtgagacgtgccacccacgataaccagggctgagatttctgccgcagctgccttcatctcaagggcatcaaagatagtccctgctagactcttgggcgagcacgagggagccagcagttgcaaaaatgacatgcccacaccgaaattttggctcagccaatggatcagctcgctgccggacatactatcgagaccaaaatgagaaaatggacggctgatatcgatgtcctcgatggagatgaacatgagcttggccagccgctgtgaaacagcctctgccagtacgatgactgccttgtcgcggtcatcagaaatttcgggtatcagtaggtcatcaccactggcatcgactatcacaccaccgctgctgccggcagctttgcgcgactcgagtgttgtgactagcagcgctgagcggcgatcctgttctatgcgcgtgacctgaaccaagctgaggttgtgcttggattactcaactccagtgagaatgtgaccctgcgtgagactgtcaaagtgctttgacttgagctgcgggtgcgtgaagcggttgaagtgccggataaactctgactcttcggcttcaatcagccccgaccgcaacaggttctcggcatactcggggttgcggttcagcgtgcccacgcctttgatcggccccagtgagactgtggctgctggtaggccattgctgatgcgctgccgttctaggttatctagcaccgcgttggatgctgcatagttggactgcgagatgtgaccaacgtatgtgactgttgagctcgtcatgaagaaatcgagattcgcgttgacattaatggtggcattatgtaggtttatggcgccgtttaccttgggacgaatggcagtgttgaattgttccagagtcatagagtcaaagaaagtgcccttgataatgtcgatggggccttctccatctcggtaatatggaaagtcttatccagtctaattgggtgaattttaccttctcggatcggaggagcttcatcgcatctgccaaaagcctattttcacatgttagtgggctccatgcattatacctgaaataatgtttgggattcttgccgttcggcaattctcagtttctcctccaggacaaagttgagatcaaaggagaagaaactgatgctccgatcaaaagcattcagccccatattgcccttgtccaagacgtttccacgtccaacatcaataagccttccacatggtgctaggcattttaagctctcgtggaacccggggccagagatggttgaaaggacaacatcaataccgcgacatcgtgcctgcttcagtatttcatccttgaactctagagttcgggaccagaagatatgatttgcgggaattccgcacacagatgagatagtccttcttttgctgtgttcccactgtggcgtagatttcagcccccacgcactcggcatattggatggccgcaagccccaaaccaccggtggcagcctgaatcaacactgtttcgttgacttctaaatgggctagatagtctagcgcatatattgcagtcccacaggcaattcccacggtagccatctctacaaggtcggcatcattttcgagtttgaggcacttctgtaccgggctgcgaaggaaggtgtcgtagtatccgcgctccaagcatatgaccttgttgccaggctggaggtgagtgacgtcctctccaaccctagaaataataccagtgctctcgttgctcgacttgacactttcaaagttgcccattgcaatgacatagtcctattatggtaattagtcgccttgaatcctgcgttgcacggtagggatatcgtgaacgaaccttcatattcccttcatattcaatcccacagccttcacctcaatctcaacctcatcgacgtcaagtgcaatgtcacatgttggtttttctcggaaatacagagtatccaaaagacctggagtctctagtgccacctggacattaccgaaagttggaaaatcttgttcatctctccctgttcccgtgtctagagtgaactcttcgttcagctccatatcggggatgacacgatatagatgataccgtccttgaggatgaagtccgtctcacacgtcgctctgttggcggctgtgacaactgtagtccagacatccgtaataggcttagcgagatcaaatgacctagcggagtcaaaccttggtccatgaaggttatacatgtagctcacgcggttgctcactgttgtcctgcccattcctagaatggccacaccttcaatactctcaggctctttgaatgcaagtgtctcatagtcactggcaaagttgcccacatacacaccagtcatgatgctgtaaatatcttcgagcgttatgcctccggattcaagacatttgaaacagcactcgtcatgccaaaaaacccaccatcgaaatcctccagtttattggaaatacaataaccctctgtgtaccgcatattccctgggcgtaccttttggtgattgtagaaagcatcggcgttgaaagggtttcttgggaaagggccgcgtacgagtttctggctcaccaaaagatcccagaaagatttggggtcctggacgtcaccaggaagtcgacatgctgatgaaaagagataagtgtcagttgagaatggatatgaggtatgaaaagcgagacaggggcgctagaagagcaagggggcaacaggatagtaacaatatgatgacttgcccattccaacaatggatctcatttattttcggctgccgtgccgccttccgggattttctcgccacgaagacgctaaacgaacaacgtggtatttggcccaacaggatccgtccggccttgctttccaaactagtatgcaaactcgtcgtcagccaagaaagctttctctgggccgctctaggcgtccccaagaaccagctcgccatgattgaaagcgaagctgtcagtggccctaacccgacagatcgcaagacccgctctcacgcgatatggaaatacatggttgacacctttgatccagtcgccgatcagacgcatatcggtgctgacaatccctcctatcaggtctgcatgaccggtgccttcacccgcaggtgtcacccggattatctccctaggaaggcgcatgccaagctctccagcccaggtgctctagacggtctgcgaatccacacagacgatgtcaacgaggtccttaattacataacccccgacactgaccgtcgccgttgtcatggacagcatagactggttcgacccgagcgccgcagccgcagcctctcagagtactaaattgaatcgcagtctaaagatgggtgatcgtgtaattctgcgctcctcggcactcgtcctttggtatatgaagacgttcgaggcccacggcttttcccccaaacgagttggtgcgcgtataagtggcgcctgcatcgaccgcgtcaacatgtatgcgtcatgttggatctgcacgaaggtggagaatttgggctcgtcgctcgagatagaccgcatgcatggcctgaaaattaggagcatgtctactgaggtctgaaatatgtagttcacatacctagaagtgtcagataacgctagcgttgcggaacgggccgaccccgctttaccatcgtcagggggaatagggtgttttttattacaatgcatgaccgtatacggagtactagattggtaacaatctttcattgaactaattcctgtctaggaactatggcgacaagaggtctcaaaagaatcattatatgacggcaactacaaatagtcaactagttaaagcgtatgcttaaggcagaaattgcaaggcacacccctactttcatttatccttcctttcttctagtagtcatcgcacaatgttctcctctccagcaccctattactcccggtgaaagactttgctttcgcagacagggctgtcggcgcccctgctgcttccgcttcaaccccccccctctcttcattagctagttaactaaatggtctccttctccttttggcaaattttattttagttcattttcctaaacactaaaagtataatgtagtacgtacatatgcatagcctgttggcaaatgacttgcgacgttactacatgtatgtaggagccaaacacatctagatcaacaccaataaaatctgctcctagcatccgtgtctactgtcagattagaggccttagctatgtagccatctgtcaataaattccctagtgatcgttgtgcgtcaagagatgggtaagctgactgcagcgggaaggcttcttggcgggttcagccaaattttggggcgacaaggggcattggcaatgtctcggatctcccgtggccgtcttcttgaggtccacagttgctgccagtgctggaatatcattggtggcctgtcaggcaaaactacgccaagtagatcggccccgggcccgtacgtgcctcttaacggttttcggacaaagatcaacaacaatctcccgtggagcgggtttggggatcgggcttggggaccggatttcggagttgaagtgtaacttccatacccatgccctaatgtcactgtgatttcacgacatatccataccatgacaggaggagttttccgtcgagggaaaagcgatggaaaagtcatctccgacgaccgaaccaactgtacgagggacccttcccgcagcagcagaagaacagcaccaagaacacgaagaagaaccagcgcaatttaataatgccaatttcactccaaagaaaacatggcgcttctgggccgtgttcccagcactatgcgcgacaactttcctctcggccctcgatacatccattctctcaaccgctcttcccacaatcgcccttgacattggtgctggcgaatcgtacatgtggattacgaactcatacatcctatcatcgaccgttgtcctaccattgttcggtcagacggcaaatatcttcggtcggcgatggatgctgatcatctcggttgtcatatttgccttagggagtggcatggctggtggtgcgaagaacatcggacttcttattgcgggacgaacaatccaaggcatcggtggcggtggtatcaataccctcgtggatatcgtcatttgtgacctggtccccctccgccagcgaggtaaatatgtcgcgctcatggcagccgtgtgggcagttggaacggtgataggccccgttctgggcggcgttttcgcccagtatgtctcatggcgttgggtcttctacataaacctgccactttgtgcagcgtcacttctattgttagtcctgttccttcgagtcacacacccgcccagcagtggtaccgtgtggctccagctaaagcgcgtggacctcgttgggaattccatccttacagctgccgttatctcaattttgctcgccctcacttgggctggaacaacatacacttggtcttcgtggcgagttctcttacctcttatcctagggctcggggggctctttcttttttacggccatcaaatgtcacggttttgtgctgagccctcgattccgctccagttgttctcaagcggaactgggacatgcgcactgtggattgcttttcttcagtctgtcctgctgtactgggtcggatatttcctgccagtctacttccaggctatccgtagctcgactgccacagaatccgggctatacgtgcttcctattactgccgcaattgcgcctttcggaatcatcacaggagtgatcatcgccatgactggcaaataccgcgtcttccacttcctgggctatatattccttactcttgcgagtggcctcttttcgctcctaggtgaccactcacctgctcgcgactgggctggcttccagattctgttcggggctggttctggtatgattttctctagcaccctacctccgattcaggcatcgctgcccgagtctgacgtggccaccgcaacctccacctgggcatttatgcgcagctttggttgtatatggggtattgttgtcccaaccaccatcttcaatacacgtgtccaggagctgctgtatcgtgtcagtgatgtgtctctgcgtgcaaagcttgccaatggcggtgcatatgccatggccagtgaagggttgatgcgtactttgcacaataccccgaaccttatggcggaagtgctcagtgtttatcaagatagtttgaaatgggtttggtggatttcgattccgtttggtggtatcgggttgcttctttgtatacccattaagcagctggagctcacggaggatttgcacacagagtttggattacccagcattgcaataagtagggaagggtgaaactggtaatttacttttactatagatatttggctccaaggttttgatgttcgtggtctcaagatttggtggattgcgattgcaaatagtgtatttcttttcttactggatataacgtttaatatgtatattatattggaggctgctctcgagttcaatcccaatgatcgaagcagtaatcccgacatccagttacccattccggttgacccccagaatagaaggtcaatgccttgtatcattaacatggggtgttgtctccatcaagcgagccaaagtaacagcttcccgaagcgcccgtccaacatgcccacgcacaccagcctcttccatcaccatcaacccaccaattgtgcagccctccgaggacgtcccttgatccttcaacagagcggggtggatgccactctgaagcatggttgccgtcccttgcatcgactgaaagatcatggtatgagccaggtcccgtggcataccaaccgccactgcggcatcaatcattgcgtcgcaaataacagcgaaaaaggctggcgtcgagcccccgacagcggtagtagcattcatcaacctcgggtcaacgtgtactgccttaccaatttgctcgaagatcgtcgtcgttatctggagatatcgctccggcaatgcaggctccgatgtttcaatagccgtaagtgactgagatacttgggctgcgatgttcggcaacgtgcgcaccacccaggctctaccagctgtgttatcgttggtggttgggctgccgtatattgtgatttcgagcttttgtcttgtccagccggctgcaatgctgatgataagcttgtcagtcaaggcttcgcggagcccaggctgcaccaggatggcctcgatatcggcagggtctgcgcctagaattataacatcggcagtttgtacagcctgtacgttgttgccgcgagaaatgcttattttgtccaaagactcggcgaatcgttcggatagtcttttctccgagtttgcactgcgcacgcatgcagtgtatcgagcaaatggtaaatctttagacttctctgtgggtgcattaaccaagccgtctaggatggcaatgcccaggttgcctagacacattagtcgacgtactttaccctatggttgcacactcaccacagcctagaatgcaaagggttccttgttgaatgtccattgtttgaatcaaccgaagaaaatattagaagggaacaaaagcaaacgcgaacttggaattttgaagatcggggacgcttccgagtgtggagaaatccgtaccccgccccaatcgaatccgatgagcttcatgaggttcgggtttttaagatatttagtgcttgttcttggaaagctatgcttatttgcatttgtttctcctacactgaccttgacgcggtagctgaatacattagttagccttggaagtgactacaagtgttgttagtaccatccttctatgaattctgcggttgaaaacttcgagaactcaaaataagcattcagtccataggttataggactcataggaatcatacaagttatagaaaggcataattggagaaacatcgggagtctccccgattccaagtttcccctcagctcttatcggggcacttttctccaactccgcataatataactcttttgggggaaatgcggggagaatactatatcagccgaacaatagcccacgggagatgcagttatttacttcatcatggtttcgacagattctattattgttgtcggcgctggtgcttgcggcctctcggtagcactgcatctctccctacgaggctacacaaatgtctcggtattcgcagaagatgattatatccctttcggagacttgacaaatgtagcgtgcccctaaaagctgtttattttccataacacaaagagagaaagaaaaaaaaatagaataattactgatggctcgattgaaatataggtctatcgtgcagcacaaattgcaggcgtgcgatttttcctgggacaacaaattgaccaaatagtctacgtgagcacgttgaccgggaaaaagagcgctggtattcgcatgaggaatgccggatttcatccctcgtcgctcatcattgtcgaaacgggggctagggatggcgattcgtccgaaattggccagttgcatcctgatcccttggccatacccctttcttgctataccaacaccgacccaaatttcgtcgtcgaatacgtgccagaagtatcttcttcggttatcctgttgtccaaaaatttggtacaaacctctaagatgtctttggtgggaccactggtcgtagatctcttagagacaacgggtggtcaacaaactgcagtgcaggttcagaaagaatcggggacttcacttcaacccttatctaggctgtgagagagactcatcaaggatggaaatacaaatcgatatattcacatcgcccaataattcccggttctcgagaccgactgcgatgtacgaacgacctatgtctaaacatacaaaccttcattatcttatttacaactactctgttcttcaagagtaaggcagctgcaatttatttatgaatcggttgaaacactagatgtcaaactatgaagtcaacgagtcaatattgtaggtcgtcgacgaggtctatcaacccgctcggggtcaaccaattcaggagctcctggaatcaacacagcccaaccaagacagggacgacaaagacccatcgcaaaagcctccgtgatacggagaactggacgtgggttagggcaaggtactcgtctctcacgggcattcgcttctctacagcgctcgatccacactgcttctgtgtgcccacagccactgataccgcagtggccacgataccatttatatcgtactttgcacatggggggtgatgaattcttcaaaaagtagagctctggggtaagtactcgcgatactagccttgggtggagagagttgatagaatatgggaggcttggaagaaaatatacatatttgtagaatctccaaaaagccctgggcccaatgaaatgaataacatcgcattaaaatttcttttatcttgcttttccttgtctaagacaaagctaataaggtgctatgatgattgaacaatgcattgcattggttgatatctttgttccaaatatgaaccataccctagtttccacttgattttcactccattctgagctaaaatctcatgttattgactattcaccctactcatgttccaatatcgttgcagaacaccaatatttccaccatcttcatcctgatctcgcagggccaagtcgatttccgatcgagtcggttatccgcaagttgcatgttgactttttgttgaccgcagaagccgtatgccactagtcatctttgtagaatatagcgactcatcctgatgtcagattttatcggtgacacaacagtggagatgtattggtccgatctgactgccactccgacagttcatttgacgctatggcttggcgctgctagaagaatcataaggtcactagatatcaaaatgtagttgtctaaatactgtctttgtaatttaatatctactgttatttcacctcaaatgaatcatcgcttgaaattataataattctcgtacatagtggtgttgggttgtggccagaaacagatatatattcctcatatatacaacaacaattaatctaacatgatagcttgcttcttgatcattaatattgatattgatttctatcgaacagacctatataagataccacaagtcacaagtatacatatttcagttaccaggtccgtcgagtacgatatctactgccggtcatatggctaggaatttgttggtcaaatcactgtagaacctccgcttgaaaccgaatctgttgtatgaattaggtaatcactattggcacagtagaaagatccttcattggccggtcgatcgttagacgttgtacagccttacgtggacatgactaaagccgtctacgggtcccaacctggcttggaagcggttaagcttctcaacttcgcaatctgacctgaagacaaatttgatttcatatcccctgaaatacccaccatggcaaatctcagacctccattcaccgaggagacagcgcagaaaaaagtcaaagcagcacaggatatgtggaatacgaagtaagtctcggaatttttcatctctatggccatgttcgaaagaagggtgaaggcttcatcccttgcattcttgccgacttgtattgtttgtccgtgcagatcgccctggacacatgcaacatgcctccgacggggaggatttctcttgtgctgttgagatgatggactattattatttgattgtgccaaaatagatgacgttagtgatgtcatctcccgttctgactatatgcgattagggaccctgcccgagtcgctcagggatacaccccaacgtgcatatggcgtgttcgagactcattctttaccgggacagaatctattgtggcgttcttgcaagcgaaatggaaacgcgagcgtagttacagacttcgaaaggaactcttcgctttccgggatgatcgcatcgccgtgcagttctggtatgagtttcaggatgtggaagatgagatgcgctggaaacggtgctatggattggaggattggacttttgatgagacagggaagatgcgcaaacgtatgatgagtggaaatgatgttctcatcggaccggaaggtaatggcgaggggcggtggtttgcagacgagcttgacgtgaacgatgtacatattagtgagcagcattggtgatatcacgatgcagatctgaatagacccgaggatgtgattgttctactattactgcggagctctataaaatctatataactaagaaggaggatatatatgtgcaactttatttggactcttaatttggccctaagaaccggatactagaacgtgcaaagcttagggatatggcatgctcaacacagatagacccctgtacagataagatggttaatagccctgggggttgaaatttgatttgttattatcccccttccttgcgggaatgccatatcgcccggacgatcgcaattgatgttgacaatgagagcacgatatgagtttgaattgtgagatacaaaattatttgagtcaggacctgagatatttcctttgaaaaaaagagcaacgaatccattgatcaaggcgctagtcccgagagcggagcagtgtgaagtgtgaatagtgacaggaatttttaatggttctgcctcgccacgacgctgatcgatcaaatctcatgataacaggcaaatatgcctacatggagtcaagcgaatacatcgtacccagtaaacaacaatagagggtgctaatgacattccgatgggaaggaaggaatctctcattccagtccagcccaagcatgcaagccaacctcttgcccttcatgaatattgacagttccaaactttttaccctccgtcttgtgtttttatctctgtcgcttaatatcctttctcttcttttttcccgctgcatctccgtcgatgatgtggtgttgaccagcccttgtcactctttagttttcttctcttccttctttcccagaatagtctggagccgatctttacacataacgtctttttgttgactcccagaaagagctgtatttttgcatttgatctatttttgttgtgcgttgggtattggtctccacagatgattgttgacgttgaacggtctgctaataggcgtctagaatcacgactaatctctaaacttcaagaagacgtggaaaacacatgcacgacttgcagagcctctacgatggatcagataatgtcagacgttaatgactctcagcggaggcgtcagcccttgagagacgcgtcgagtcggataaaccattccaagtcgccaaatgtcgtcgagacaccgcgcctgaggatcgaggaatccgagcagctaaagagtccagaccgggtgtccttccttatgaccccgaccccgcaaagaaacaaggaaaatgaacggctctccgtggccatcgactcgcagcctgactcagcccggaactccatcatgtctgcagcatccattttgtcgaccaaaggtaagaggaaaacacatgtgggaccatggcagctgggacgaacactggggaagggagccactgggcgggttagactggcaaagcatgctgttactggacacacagccgctatcaaaatcgtttcgaagaagtcagctgctatggttcagagtgagagtatcgcggcaatggaccgtaatatggggaacttccctaccaatgcggccacccgacaaatgccctgtggaattgaacgcgaagtggtcatcatgaagttgattgaacatccgaatgtgatcagcctctatgatgtttgggaaaatcgaggagaattgtttgtgcacccaacctttgaaattgagaatacactaacgcaatagataggtaccttgtccttgaacacgtcgagggtggagagttgttcgattatgtatccaacaatggaccattgccggaagaagaggccgtacgactattccgacagataattgcggcccttgggtattgtcatcgtttcaatatctgccaccgggatttgaaacccgaaaacattttactcgatgcaaaccataatgtcaagctcgctgattttggcatggcggcactgcaacctgctggccactggctgaatacttcatgtggtagccctcattatgcagcaccagaaatcatttatggccgcaaataccgtggcgacagagctgacatgtggagctgcggtatcatcttgtatgctcttctgactggttacttgcctttcgatggaggggatctgggaagcaccctgcggcttgtgaagaaaggagactacgagatcccttccgagttgagtgatgaagcagccgatctcatccagcgtattcttcaaaagcgcccagaagatcggatatccatgcaaaacatttggttgcatccgttactaactaaatatgaaaagcttcacaatgcgatgattgatcactacgtcggtcctcctcctgccctgtcggtgaaggactgcggtcaaaccctgtcctgtcagcaggacatcgatctcgatatccttcgcaatttgcagactttgtggcatgatgtcaaggcagacgagctaattcaaagacttctttgcatcgagtaagtaatatctggtagatatgagaaataacttgcgtgacgctaataaatccccacagaccaacgcatgagcgaatgttctacaatgctttggcaagatttcgtgatgagcagctggagaactatcaaggacagcctctagagtgctcagctagtgactatcaccacatatctcgcactggcggtagaattcgtcgaggccgcagccaaacgggtcagggtagctccaagcatcgctctcacttcccatctgttaaagagttccctcgtcgcctcagctccttcaaggagccaatgtcccccgggacggtggcgagctatgacccataccggtcacccaagcatagtgacacagcatccgaagcacagtatgcccatgttaccgtccgccgagagccctcagatcaatgccaagctattctatcgtcgccaagggtgaatcctcctgcttccattgcagaggagcaagagccagaagaatcagatcggccggatggctcgccgttcacggttctccagaagcgaaagcagggacctagctctatgaagtcattcgtctcttccagggtacctcattctagctcccgcgcgccgggattgtcgacgcactcgatgagctatcgtcgcaatgtttctttccaccacgctcgcaaccgctctcatggatctgcatctgctaaactcaagaaaagaaagattgtctcaccgaatcagccaaatgagatcaagcggtcaccgagtacctgcagcttacaacttatggcagatggcctcgatatcccggatatgccaagcagcccatccctgccagcacagccaaccatggtgcgagggaatggcccaaaggtcaagagcttgggacaagtcagaaaggttcgtgatacagactacacatggagggaggacacccggaaggtctcccatgagctcagccagatctgcgaggaggcattcaatggaagctctgccacaaccattcgcactacgagcggtggatccggttacgaaacaccgggaactccagtctcaatggcaagccctgagcaagttcagcctaattcgacgaccctggcgcctaacacttccaaggagtcatccggaccctacaatattaaagagcttatcgagacacgccaaaagctctttgagcacggccgggaccgaaaagacaacgttcctgcttatctttctggtgtcataactcatctagatcgcttgatcgaagaagaccaggtccagaatggtgcacggaaaccgttggatgtagcatccttcaaagatcctttcgtcacttcaccaaacgagggcttcccccctgttaccaacgataatcgcgcaagccctttccgcgcactaagccagattagccctcgacggcagcaaaagccacggacttcgctcgctacatctcagggcggcgatgtgaaggccaccatccggatggtaccacacagctcactgccctccatggaagaagttaagcctttgactattcggaagaagaactccagcaagttcgcttcttccgatgttcatgaatttgctatggttgattctgcgggtggcgatcggaacctttccattggatcgcgacatgctggtcaacctagtgggctggctcccattgaagaagttccgctatcccctaaaaaaaccacaccccatgcccaggaaggaaagaaatggtcatggtttaagcctcgccctcagggctcttacaatcctcctgctctcccacccaaggacagccatctcatcattcctagtgggggcacaactgtgcacaatgcaattaccctcgagcctgcgtttccccccaagacacaaagcccacagcaacttccccgacgaaaggcatctatggatcgctttggcggtggctttttgaagaaacttctgactaagaagtcccctcagaatatggaagaacctcctgctagtgagtgcaacatcggcttcttttgcatcatatactaaccaatctatagacaatgaaaaagaccctcaaaccacgccaaccaaggacaatcgttattcttccctgatgtgcaagggtctcgcagacaccgacagttccgttgaagcggatgatccgccaaacccattccccaacaagcgccgctcagttgccaaccacaactggtttgcccgggttttccggatcaagcctgctacccacgtcattgcactcaacacgtccaaggttaagggacgcaaggaactctacaaactccttcgcgagtggcgggattttggcatggaggatgtgtacctggacaagactaacggcatcgttcacggtcgtgtcagcgaagcaaattgtaagtcactcatttcatccgatccaatacttgtgctaattatcccctagtcctccaacttcgggaggttgagttcactgctgaattctacactgtccttgagcacggccaccaagccaacctcagcctggttcgctttaaacaggagcgtggagccgcatcgtcttttaacaaggtcgttgagacagtgcagagcacactgatgcgccgtggcatggttgttgaagacccatttcgtgcaaagaagatgtccagcgttctggattccgtccctaaccacaaataaactatttcacgactcattttctggataacccctcgatcccactatgaaggatcgccttcaaatactgatagccaaccatcgtctttcggttctcaccactacgtccgcaaaccatcccactggcatgctgcgttccagccctgcaaaagcactttccttgcatctcctattgtccgcccgttcagatccacactcgtttttgtctcggacaagacccagaaacctcacaggcctacctagtattgccggccacatccatagtttcatttcattttgtacccatcgatcatttccatgtcttccctttctctacttgttaattatccatttatttccgcttgtgtgtcacttctgggttctacccatttgtcaattccaccaatcttctaatcgatcgggtttcacctcttcattccgcgtttttgcatacaatgcctaatttcagcgagtcgcccatgtcctaaggcatcaaagccaaggaaaaattccgtatatctaattagtgtcattgaagtggctggaatagtcaatgtccacacattatacattctatcctcagcgtgaacattgcccatggataggtcctttatccagattagggcaagtcacgtggtaatcactcgcatatgtacccaaatgtatgtctgcccgtgcccggtctacatcgtacatacatacgcggtctatgcaggtcgcagtatgctgaatggggtaggtgcatgatgtagcatgatgtagcatgaaaagaatgcaatactcgatctccaatatgcagccaagattcccccttcacagggacaaaccatgcagccaatagtcgcgctatctagggctgagaacccatccagctctaacactccacctagatcagaaaagaccaccctagatcagaaaagaggctaacgggaagtaagggaaacggcaccccacaacaaagagaaaactaggaaatgctctcgtccagatgggatcaattggatctgcaaagccagagaataatactcggtataattcgcatcatagaatttcatcagaaagcgctcagagatacaaggatcccaacggaaagtggaatagcacgcggcaataactgaatagcagaaagagtgatcaaacaacctccggatataagtataagcagatatttgataacgaaaagacagggaacagtaaaagaaatgagaggacaaacaaatataaaaaaagatcaaaacagttccaacgataataatcaaggcaaagggaaaatatgacacagccaacccaagtattttagtcgcataggcgagaaaacagatggccacacatacatcgtaaaagatgtaaaagagtagtaaatagacaaatgccttcccagtaatgtaaaatggaaagaagaaagtagaaagaagaaaagacaaagctgacaacagtgaaaaacgcgatgagtgaaaacgagacaaagtgcaaaaaaaagatagccacccgaaattcaaataacaatgcggataatatctgcagcctcgtagttgtgaaatgaattccacggaaaagacagccggagagtgtgtgattgacggtgatagtgcagaatgcgttcatgctacattttcaatcgaaactagcaaatgaactgcatgcacctgaaaatcatcccaaaccacactctcagcaaagccaatcaatccttggaattgcgattattcagatatcgaggccgagaaaaatcgaaaaggaaaaacaaagatatgggagtaaaaattcgtatgctgataagaccagagcccataggcctggaagtttcagtatcaagttcaaaatggtgctcgtgaagctcgtgggttcgcgtttcgtgaccttgtgatagatcagagagtgacgttcttgtctcgttcatcgtccaggtactcgtcattgtctggaatgtcattccgaaactccccttgcagcccaatccacaacggtccgatgagacctcaaatcttcttttcaaattgtagctctcaacacatggcacttggaccgtgtggccagcacacggcccattccgaatgttcctcattcctcaccggtcccgtaaggcattctttcgtgcatttcctagtttccaccaggatattgaatagcaacgtaggtattactattgcggaccgcggcgattcagcgcattgagcatatcactatcagtgctggagcgaccctgggaatcgccggggttcagcatatcgcgcacattcaggccacctcgttgcgagccacccggggtagaagttggcggcggtgtcactccccctggctgaggggtaccacttgacttgattggcacgctaccctgttgagccgagactgggggtatgctaccctggtgtggagtcataggcgcctggtggggctgcataggtgggaagggtgagccgtgaggtgaggaggaggggcgtgggtcgtagttataagccgacggcggtgaggtgcgccgatcgtggataggcggagggggataggcgtaagggctcggggtagtgtgagtttggtatcctggagcagatccagcgggcgtcacgggagccagattggttggatcggggtactcaaatccagaatttgagcctcggcggtgtctctgcgcatcaaaacatcagctcgagtctctctttctctccctcttaccagagggggaatggcggccttaccggatcgggcatggttgacgcaaggggcagcgggacaccatccatgaaaggtcgtccattttgatagtacatcccttggggcggtggcaaggtggtctctggagcctgcggctgctgttgagggggcagaggctgtccgtgggcaccgtacaggacaggcggcccaccgcggccccctgatccattctgtccaggtcgtaaatgagggtaggcggtgtgtgcgggcacaaaggcttgggtttgcgaagagactggggtgaacatgcagtcttggttgaatcgaacacagttactgcaccgtccatctgcggaggtctcgaaacccgagcaacgaatctatccggtcaaaattagcgcgtgatgactcgcaaatggggaggaatcccctctgtaccttccggcgccgacaataccggcatgcaatagccgttcgctgtcgcggagctgctgcttgataaggcccttgtcctgtttggggtccatatgcatcggcgcgataaggacccggcggaggtgggagacggtagggatcttgcgctccgtggatagcgttcatggcttgtgggtgcggatatcttggatccgggtactgcgccggggaatactgcgatggggcgtactgcggaggaggaggatactgcgatggcgcgtattgtgcgggagggggatattggtaggcacggtcctggtcaggtggcggagggtaggaagtcggcggatactatgaagctatcagcaaccgcagccaccacaaagtcacagcactgtaaacaggctctaagacagcacatactgggtaggaaacctgatcatccggactgttccactgggtggctctggggtctcgatgatctcttgggtctctaggatcctggcgatttggatcaccctgacggctagggtcgtgatcgttgggattgcccgacatttgtgttattggggaagagtaagacgagataagtaaaggatgcagggatgatgtcgagttggtgaaaaggggagatcgaatcacacggacaaagtgagcatagcgcagtcacgcaggggaaaggcaagaagggcagatgcaggaagatcccaaaaaaaaaaaaggaaacagaaaaaggaaatataggaaataggaaagcagaaggggaaaaaagaaaaagaaaagaaaaagaaaaagagagcctcggtgattatgacgtgagcagatataaggaattgaaaaccccacgacaagataagcagagaagagaagaagaaaaagaagctcagatcggaatgggcagagaataaagggaatgaattatttgattggaaaagcacaggggaatttttagagaacggggtggagcccgggcagcgcgggctaaagcggcgccagtgacccatagacatggaggggggattactgtacagtgacagtgtatctatacgcggaccattgtatgtaacagtttgtgtgtccatgtcgaatacatgcatggatacggagtacatcgagtaggatgaccttaccttacgctttcatttcatccagtgaaacatgggagacaagattttgaaccatggaatttaatctagggtaccagatttccgttgccatgaagccgagaacggcgaccgctcttactttctggtttcttttttcattcttttcttttatttttatttttttcaactagtagtagcgcccgagagtaactttccacgtttttcgccactctacattattacctggaacaatggttatacctccataataataatggaaacagttctacatgtttagaaagattatttcaacttccaaagttgacatcatcatcaatgtggcaggtgacctcttttgcatgggtcaatccatgcacgtcaattcctccgagtgacccttgctgcgtaacccgcccatggacgaacgaccgcctcggaccgtagtcgcacaaccgcaaccggccccgcggaaccaggatcattttccatggcgatgggctcgggtcggggcgacacattcccatgcataatcggggttggtttaattgtattttatttttattccaaccattaaatggcagtattatataccctattttttgtcttgaccaggactccctagtccatcaagtacatggaactactgcatgtaggtactactttgaaagaaaaattcaagcggtgaaagtgtggcgatcagacttcagctgagggagtggggttaagctagaccactcgccactcttcaacaacgaacggcatccataggaagacaaaggttggatatggagtatggcacaaagtctgtgtgaggaaaaaaaagtgtgacgagagcggatctgaaatgaaccagactttggagggaaagaaagagagaacgaaggggggtggagtgccctaagttcccagggctgtagcactggatccggaaagcccataatgagccaaggtaacctgcattagcgctgcgctgacagggcgggttccttgtccaagagccacaaccacgttgtacggggggggctatttagcgtacgcccccccgtcaccgccaatctctgatcaaagtcttcagcccatgtcatttgcaatatacagggaatgtgggttctgagataaagtgtgaataatagcagatggtcatagcgatggggggttaaaaaaaaaaagagcccacccgcacaaccatggattgaataatatatcgagcagattgtaataatacgagtgctctgtactattgcgcaggattaatcaatcaagtttcggggtacttgtcccacgggccgctccggccttcccgccgatctatgcatgtgtgccatctggcaaaaatacatcctcggctgttacagtacagtatttatctacgtctcgggggcacatatatcttctacataccgtgctatcatagacatgacctacttgtcttggttacttaaatatttatgatatgattacatggatacctcatgaaaataggtacatgtataaagtgctcggttttcataaatataatacactatcggtaatacacagtaatacgacgtaaaatggagtacctcccgatataagacaatcctttcaggccacgtttttcgaacccaatcgactgcattgccgtccgcgtctttccgttccccactctcaggcgtggcatgttcagctttgtccttctagtattagcgtgctctccgaagactttctaagatccacccggtccaaagctgctggccactcgatgctgtttgtcctagagacgcgctagctgtcctccaaactagcccatccgacagggactgagcgctgtttgtcgaaactgaacgcccaacgctaggggacccattccgacccggggcctttttacaggctgcgacgttccatcgtaaagtttttcttataacatttttacattatataatatttttgtactttttttggtttcaactttgcatttagtgtgatctttttctattttctatttatttattttttttcccccgaaatttctaagttttcgtcccaactccaaggtataaaaccccctccttacccacacgggagcgcgtctatcagcaaggatggagacgggtcgggcactaatagacgcagcccgcatgtctatacggtcacgggaacaccataagcaccaatatagtaatgagtaaaaaaattcacagggagggcaaggtctgtgctggggatctgacgtggcgaggggttttttttttctgcactgagccggaacaaggcagtgctttcaaagtcggtgtacagcaaactcgaacgtgcaggtcgtgtgatgggagatgcctgatgactacctgatcctgggaaaagcatatgcgagatcggcaagaagtcatcattagccgagtctttgatctttctttgctcttctgttcttcctcccttcgggtcaagcaagtttcctatttctgttattcgtgtcatattcgcatctgattggttcccaccatctatactccgtacctcatcggtcaacaggtgagccatgctccttaactctattcgggcgctattcgggagacaaagcgagtcaattccactttgctttttctggatgtggttctcgggagcgtgcgtgaagctagggacctatggcatatttaattgatgcgcaggttaactgcttcggatttgctttttcgagtccggagtccattttgcttctttaggcttgcttttgactttgcaaatctgaaaccacctaggtgtttccggctagattggattttgtattgcatacagatgcatttagggtatcaccaatctaactcaacagtaggtgtctcataaaatcgaccgactctctcaaggttttaaaggtcgatccggcgtctaccttgatccctgggtttgagttaattggctgttctaggtcaataaacatcatgcctgtcgataacaaacaagacaaattgtgacatgtgattactcctaccctagacgtttaaccccaagtgtataaatcttgtcagcccttgagcaacagaatatagttcgggaattcagattccacgaagagtatttagggaatgaatagagtataattaacatgtttaatccccgacatagagtatagacccatcatggtcttgaaccgcgaacttctagccctaaatattccttgggaagtcgaaataccttcgatatctcgcaagactttagcatattccattctctgtatatctagtgacttacttaaggccgccattcacaagctttgagtcccaagtgtttatgaaataatgtctacttattctgtgaccgaggttgtgtatgtccttatatcgatctctcaaagatcactccgtactgaaagtgggaatgccaatcttaggtctgatgcgtgaaggaccatgacaatatactggaccccgggataagaaatgctcatcgtggacagccgagtattgagttgatacatgaccatcacgacatactagactgagaccagcggaccctgcctgaaatgaacagcatcgtccgagaatcagaaatccgcagtgcataccaaacacatacagtatgcattactccgtacaatgaaacaaaacaataccacccagtcaaaaaaaaaaaaaattggagtccattccagacaaggaaggtgctcatctcaaagcccaaaatcggggacggcggagtagaactatccgggccccaatccacattgcctgcaggcccaagtttagtctagcgggcatgcccgacaacgggccgaacgcgggcgcttgcggtggcgatatcatgcgcgtcaactgagtgcttcatttaattcggagagttgtgtcttctttggtttgcataactatgttgtacattcgaaattcggttggggaggagtgtagattgcaaaaaggttaaattgtatattgcacgcgaggggctgcgaggggctgcgcagccattgggtgctggcacggctagcaggattgcgtcgaagtgtctagaactgcgtgtgtcacagtagtaatgtctcaatttggagcgttgcccgtgtactatatagtctgcagtgtgcagcagtgcggcagtgcagcaactagaggtgatatgaccgcagagccaatgttagttgcgttatttgggcccgcgccagtgttcggcctgcagtagcaatccaggaaacgcggcggggactgacgaaagaagccacgtgcaggaggcgtcaaggtgggggatgggatcccggtttcacgtcgaggacttgcgagagacaaaagacccgagctaaggcagacgttgaacgagaaaaataaaatggagaaatctgacttgtaacaaatacgaacagctctttataccccaactttcataccacacacgcatgccccgaagtaagaggcaaagcgtaaaacagaacagattgacctctctcccccctcccgaggtcccgtccaatgccaaataggcgcgggtggttctctccaatcatgtcactgatcaggcatcactacactgttgagatacgtcacctgtttgagagacgaggagcggtcagcggtcagcaatacagattctccaacataaaggttattgtcccaacagccttccgatcctgtcaaagcgggaaggggagaaaaggaaaaaagggagaaaaaaataaaagaaaaaatagggaaaaaaaagaaaaaaaaggaaacccatcgtgacaccagcgctggttcgggtgggtaaaagggacggctaacaccgccaaagcggctagcttagaagtgaaaacagactagtcaagagggggcaaaaccggcgggaaagggaaatcgggaatcgatagattggaacagggcttacgaaaggctccatgaccccaaccagagtagcaatcatctcttgggcattgtctccagtgagttcatcgtcggcaataggcttgccaatagtgaaactgcgtagtcgaagtaatttgatgttcttgttgtctgcctcgtaaccctagaaggtgtgtcagcaagggcccttccaaggttccaaagatgaatcagacgtggagcctggcgcgagagtgaaccatggaaccaaagtcgacggcgtgagaacgaatcccattccagcaagtgcgattccccattgagcgcaaactgccaaccttggaaattgcgttgctgggttccatggttgcgttccgggagtgaaaattggcctaaaacacgggttggcctttcccgtaacccccgtgcgcgtgtcttccacatctcccgaggtctcgcgtttgatggttcggagcacatgaagcactcgggacatctgaaactcttaaattctctcgaatcctcgggttccttccatctctggggtagccggggtcacgtccagcagcccgaccacggcatcgcttggtcaaccgcaaagaactggtctctatgatctcatcagaccgttgctatcaaggccaggaagatggtactggtcgatgcagacgggaatgaattccgtttcaaggaccaatcccggtcggacgatggacgcaacctcgatagcgaaccttgtgccccctgcctccaagacctccgcgtcccagccataaataataatcaaaccgctgacaatgaaaccgaagcacaagatgatgggaaggagtaaagtctgcctcaagggacaccatacttcacattgggctgagggtggaataaacaacagaacacttctcaccttgggcttcgtcttcagagcagactccctattgtgatgcgtaaaagcatccacaaccgcgtcgtcatcgtcggacgctcccttcaaaaactcacgacgcatctccggcgcgcggagtacctccttcaagccatccgagttctcgtcgatgtcctctcgcagcagtgcaagtggctcggtctcggggttccacagcccgcagcctatacacagcgtgggattagtctcaatggacaaagatcacaaaggaaggcagaatagcgatggcgacagtggaaaccagccggaggacaacctaccaacaaaacaagagtttggctggaagtggacatagtatgctgcgtatgggcctttcttgccagtccgagacctgcactatattcagtgacttggctttccaagaaattcattgaacattgacacttaccaggcagcggagaaatgcgtctatacattttgaatcagcacaagcactgctaacgagcccgcagtaccacgcaccccgccacatacgcacgcatgcgacaggcacagcgagagggacttggaggggaagatagcttaccttgtatggaagtggattcttgctgaagcgaacatccctgtggatgcggaatacctagggcaaaagtttatgagtgccgggcacaggtaaagacaggagtattcgcaagcctaccaggtccttcacaggaagttcagggatggtagcatccacctctgcaatcttcggcgtgagggactcaataaatgtctcaaagtccttctttgccgctcggtaatccggatcatgcgctacacaggtcagctagcaactcgataaccggggtatatgcgcgcttctcaccctttagccattggcggtcattgttactagctagatcgatcaagaaaagcctagtattgggatgtaaggtctcatcctggtacggggtgttgcccgcatctcgagccttgggctttgcgatgatcacttcttgcccgggctccaggcccgctctgacgccctcacgccagagctccttgcccttcatagggtcgcttccgctgctggtactctgtcgttgcttccccctcgcactgggtttcttcttcgcgtcctcgtctgtgtcggagagttgttccggctccgcatcctcggcgggggattcctcctctgcttcctcgtacacagagccagaggactcctccgcagagacatcggactccaactccggctcgtcggagtcttcttgctcaaagtacttgctcttcctgctcgtggactttgcctggctgagggacaggtcgacgtttgacttgacccgtttgacccccggttcggcggcggacagtctggctgaagcgcgtcgctttgacgccgtaggcgcttcaggcgacgtcagatcaggccgagatgaccgtcgtggcatacttagataaattcaatgaaaacgttcaaactcggtagagtctttgtccaccctttcttctctatagagtaaggagttggaaccctggtttcgtgtttggaattcaagaaaagcaagaaaagaagcaaaatactgtagatgaaagaataaaagtgataagaataaaaccagaagggtcccacaggccttaaaaaccggctgtaataaacattctccgcttttagtcccttactgttttttatttttttcctccgtttttcccccctcaagacgtatcgttggtaccttcagagacatcaatgttagttgttgagaagtgatgtgtagaaattcagatttgttggaaatggcttattgtccatgattatatattccgatctcagctggaggaactgatcggggatgagactgcgatatcggtgatggttttgggctggctacatgtagttgtgcctaacatattgctgtctttatagggggtgcacaaggtcattgacttcactaagagctctcaatatgtcccaatctcggcccttgactcagtggcagatgtactcccacgcctagtcccctttattttagctgtgtcttcgtctgtcgctctgaccatatcgtagccggtgctcgtttggtctttattaaggatcgatggctcgcagtggtaataatgagaattcggttgatagtagctgaggtattccctcagcttggtcacaagtaccccttctaggaaccgacaagtgttggtagctgtgtcgactttgctgagtgatcggaggttcttgtctgattctggtaagtccatagatagttgcaacatcgagattaagagacaggaggttatttaggaccacaataacccagaaagaacattgaagacactaatgtgctcagcgagacagcgagtaggaaataagaactagtaaagtactgacctacttcagcaattgcccggaatcaaagaggcgatgttgcaacgctctgatcaacctaacctctgtcttcttaatgtttcaatgttgatctcagccttctattggctgtcagctgtcctactatatgcatgttaccgcatagcctacaaacaagcaaaaacaacgcccgcctagagaacaaccacacaagaaaaagcaaaggagagaattcaatgtaaatgagatctagctagtcaactaactgaaaagtgacatcaaggctagaaaaacatgaacctcaaatgagtttcctcgagggagacctcacaaaccggccaagcacatcccgaaggcagcagccgtgagtgggagatctcgcgggaggaaaaagcgagacaaaggaaaataaagaaaatggcgaacgcgccagggagacaagggttttctgaataaagctggtggacgtctccatacatcacacgcagaaaagaaccgagaaaaggaaaaaccagaaacacaagatcattaccattccgatgaaccaacactcctcaagcgagaagtactggttcaggatatccaccgcgtgtggcgattacttctttgcaaatcgagcaccgcggccagcagctcggaactcatcaaacacctggcgatcaatgttcgacagatgagtagcgtcggagcgagaccggtggctgctgggaccaagcgaaggaactggaccgaaaggatcagaggacgaccgaacgttctgcgcagtcgcatgcggagcacggtagataggccggatatcaccctggctctgagctgagccacccgcagttgcctcctgaagttgaggcatacgccagctaaccgactgtttgcgggatttggctgaatctggtcgttggtgtggcggaacgtaagcaggggccgatgcgcgaggccgatgagtcggggtgtccggcagatattgggcagaatcaagtcgctgagagctttcacgggagttaccagagatattccagttgttggttaactcaaggagactgctagacatatttctggtggacgaaacagtcgagcttccccgagaagcacggccggaattcacggagccactgtgggaaactgaaatggtgcgctggctgtcaactgaggcgagactatgggttggcgatgagccaggagcagtgccaatagttgagatgctcgagtttctcctgtgaagttgctggaatccagtgatgatgaacttccgcagaacactagcttcgtagatgattgcatccttgaagatcttgctacgggcaacatcatcatcccactcaaaccagaaccttccgaagattcgttcgacctcagggtgagtgtgttggttgagaagaccgtcgttctcagtgcgcagaaccgaaccgttggacatgacataggaataaaactatatcggttgaagattgaattagtaatttcccaaaagaagacaacatctcagccatgttacgtacctgaatagcagcagaatggtgtccaggaatgtaggtcagagtatcgaatgggaagtaaaggcaccaattatggtccaataacccaattcttctcttatccttcgaccaccaagcaaaacaatatttcatgcgaggattaaaggcagggcagctgatccctgcattaaccaactcattgagaaggcggatatccaagcccactgtgtttgccttttgcatacgttccactagagtcttgatcaaagtaacaagagttttgaaaagtgcattgcggtgatgcacggtgtaaagatgagttgcatgccatgggaactacatccgaagacaaagaatgtaagtatgacatagaagggcaaacggagaggtatggacaatgattgacttaccttccagatagtggtaatgaacgattcgtaacaacgctgagggaccttgctagcaaatgcactctgcaatttgttaaggtcagtaacatgaaaaaaacgaagaattcaaaaggaaaagtagacgtactcggtgaggttgctctgcgtgccgagtgaggcaaaacagctcctcgtcggtgagaaagccatcaaaaccggtggaccaactatctttgttgacaagctgaacaggattcccatcctcccatgaaatgcacttcgcccggggaaaagcagccttgagaagcttggctggggtgctgagttctatgtcgacatggcggctacccatccgtggggtactaccaacatcataggcacgattgatccggtcgacagtttcttcggcatccttctttgttgggaattcaacatagcagtccatggtctttccagtagaccgttccataataatatggatggggcatccttgagaggatggaagcaggttcgcactacgtccaaggaatgaggccacctcctggcgagtcacagtgtacggaatctaagtatcataattgttagtactggaatgttaaacaaagcagaagaacatggtggaaactcacgttagaaatcaccacaacaccattgcgagaaggtggacgcatctcaacgatgctcccaaatggaatggatgcttgctggaggagttcttcgattgagaagttttcaagacgctcaaaatccccaaaattgggggtcccaccctggtcgaatggccagcccatgttgatggcgttggatggaccaaagttgggtttgcagacgtttgctgtagtagagaccgttgtcagtgaggctcaaacagtttcactgatgatggtatagcaggtcgaccgatcacgatgaatggattttgaagatacttactgggttggaactgaccagagaggtcaataggattgtggtgagatacagtctcaaaaggatatcgacgagattgggactgaagactgagaggagaataggcttggggcacgaattcaaagggcctgggatggaatccaggctcaaactcaagacggcggtttggagggggacgaatagtggaagacgaagatgaacttcggttagaagaggatggggtcgaaggaagggaaggatgggataggaggggagaaacctgagcggtaaactgggcaggaacctccacaagagcctgagcagaaagttgagtgagagctggggtgcaatcagagggcgatttcttgagagaagaacaatcatcgacaattccaggtgagtgtttgcgactctcagagacaggcgtagtcacagtcggtgactctgggcgtgagttctcattgagagacattagatcaacattagctgctaggatacttatactggcaggccaatcctcaaatttgggcatatgcccatgttgttcactcatgttttagggctgtctgggatgatagtgcgtggaaacagtgcgtggaaacagaaatatttacgagagaaagtgcgtgttggtaagaatgaactatttatatgcgtggaattaggctacaccacgcgtttacgagttcttacctgtgccgagagatataagatgggattcgatctcacctttctcactgccatgtgtgctgtttgtataccgaggctttacggtacgtatttaaagcgacgcactcgtttctgcccctatccactaatttcacgtacctgatccgcaccaactgaaattctacgccttccttgtagatatcgcttctcttgaagataagtattctgctacttttgccaaaacaccgttggtcgctggtgtgatttcttcttgtttattcgttcaatactataagcgctatgtaggcaatttccgtcttgattgggaaggaacaggccatactagaatagtaggctagtgaggcactatgtcggtggaaatgtgttacaaaaaaacccgacatcggtataaagttctctcttaatcaatgcaagcctatgctatctgtacaggagtagaaagtggcaaacacagggccattcattattcggaatcaacaaggaaacgcttggcaatttaatcgaactgattgatcgtcagcaactgggtcaatggtagattattccatagagacttaccggtgtcaggaaagactccgcaacaaaacgagcacgggcattcaactagtgagctgttagtgacctgcaaagaacacgaaacatccgtacacatacgaagagcttcatctccgaaatctccttgtccacctcctccatgaattcgatcacgaaatcaatgagcttgtgggtaagcattttttccgtgtggaagttcgtgatgaggaaactgatgtcatatccctccactggcttccgacgcagaatgaagaacgattccgctcgctgggtgaggaaccgagtgaatttgtggacaagaatgtgctcgatctcatctgcctgcttgattctgatacttatgcgaacagaattgtagcttggctcaatcttcaccttttcattttcattcctgctgatgtgcaacctagaaagccatcaatacgtttgtccggtgcgaccttggatgaaatgacggtcagacgtacgggttcagtaggatctccggcgaagaatttgcctcaatctctgggcagttgctggtgaagcccagtatattagcatattccatgtttatcacttgaaataggggcaacttactgccgctcggatgtctgagaagcgaaattggagatcgtaagagctgcggtgagagaggaccgaacactggtaaatggagtgtgagaaagcctgccgctgaatatttgtcaagtgtcgaactcacgcctgtaggtagggccggagagattgactctaataatcaattagtatagaacgagccagctgatttgagctgtacccaccatgatgagggggtggccacaaggatgcagtcgtgacgggtgatgatggtcgggagctagttgagaaggaattcaattagcccgttgtgaggaccctttgacctaaggcagtgagcgagaaaggcagttctctggataacaggttgtcttaggcagaagaggagttgacgtcggggtgggcggtgatgatagtggttgggcggtgagagaccccccacgctccctcgtcccaggtgtttaccatttgccccagcaatcgcaagctctttcaagctcttcatccttctcacatcatccatatctaaaacttattgaaaatggcggctataccgagtatgtatggacgtattggcagtccctggaccactactaacggatctacagttattgtcaaacacgccggcaagcgccacgaagtcgagctcgatcctacgacgaacggcgaaacactcaagtaccaactcttttccttgactggtgtggaacccgaccgccaaaaggttttggtcaaaggtggccagcttaaagatgatacaccgctttcgtcacttaatgccaaacccggacaggtgttcatgatgatgggcaccccatcaggaggtcaaggttccgctgaccttggtcggccaaaggagaccgtcaaattcttggaagacatgaccgaggccgaggtggcacgacagaaaggtgccagacctgccggtttgcagaacctggggaacacatgctacctcaactcttccctacaaaccttgcggagtgtccctgagcttcaggatgagctcctacggtatcggccgagtggaggatctggacagtcgactctgtcagacctcagcagctttggtattggtggccttggaggttctcgggatttggccgcttctctccgagatctgttcaagcaaatgtccgagacccaggagggcatccctccactgatgttcctcaatgctctccgagctgttttccctcaattcgcccaacgtgaccgaaatggacagggatactcccaacaggatgccgaggaggctttctcccagatcttgaaccagttgcggactaagttgaccatcaccgaaggcgagggagagtctgctaccaccacctcatttgtagataaatatctcgcgggccaattcgaatctatcacagagtgtgaggatcccgctgccaaggaactcggcgagcaaccgagtcaaagttctgaagttttttacaaacttgattgtcatatcggaaaagaaacgaaccacctgcaggatggaattttggccggactcgaagaggaaatcgaaaagaactcccctcttttggagcgcaattctatgtacaaaaagcgttctcgcatcgcacgactacccaagtacctcacagtccattttgtccgattttactggaagcgtgaaacaaaaaagaaggctaagatcatgcgcaaagtgacatttcctgccgagttagatgttgtggagttctgtaccgagggcctccgaaagcagctcatccctattcgcgacaaggttcgcgagatccgcaaggaggagctggaagttgaacgttctcagaaacgtcaaagagttgccgaagagcgtgcagagcgtcaggcgaaagagaccaacttgggcgaaaatgtggagccaatgcagaagaaggccgaggagaccaaggctaaggctaacgacaaggacggcgatagccagatggaggaaactttcaaaactgatgccgagtacgaagcagaaaaagcagaagctatcctcgctgctaagaaagagctccaagagcttatcaaacaacaaggtgctggagatagcggaaccaatcagtctggtctgtatgagcttcgcgccgtgattacccaccagggtgctagcgccgacagcggtcactacacggcatacgtcaagaaacaggagcaggatgatcctcagacaggcagcaagcgccgcgaggcagacgacaagtggtggtggttcaacgacgacacagtgactgaggtggacgcgcagaagatcgagaccctctcgggtggtggtaagtgaaccgcattctacattttaaaagccattgctaatgacatattaggggagtcacactctgccctcatttgcctctaccgcgcgattgagctgcccaaatgcgagtaaatgggcttgccttagcatctgttcacatggtaaagaaatctgcaaatgttgcctctagatgatagaaacgatgaacatgaatgatgctagtccccaccgccttcgctgttaccaattgattgtcttatgccttgcaatgatctacattttgtatgttgtagtcctaatggatatcttctagttagtgacgacatatatattaatgactaagcaatgtacacgtgacatggttgagcctcggcccaaattgtctcaaagctctaattctacaggactggcaatgtaaccaccatgatacattatcgcagcatcctccagtcggcccttcgccagtctccaatacacacacgatttctttggagaccggtggtccgaagcgtcagcaccgcggcacaaccaaatgcctcccgagaaccatcgcgctggacgcgccgcctggtctataccggtatatttggaacgcttggcatcggagcagggaaatggttggacaacaaaatctcatcgccattggatcctgggtcgttagaagaccaaatggagattcgggaaatccagcgggtattcgacattggactcccgattgtacaagagctgcgtcgtaaccccgattacgtggaaaagaatgtttacgaaaacttcgctgataagcacaaaacccatcggctgacatcaggccccttggctggcagtaggggcttgggattacaggttagtctctcgttttctcattgggttccttgcatgaatgccgaaccttttgactaccaagcctcggaatcccgctttttctaactgtcccgtatctgacagaaagttttctggaatgacaaagagaagaaaatcattagcgtggtcttcttgggaccaggccttgaaggctggccaaccatggtccatggaggcgcgctcgccactgtgatcgatgagaacctggggcgtgtagccattcggcatttcccatcgcgaactggtgtcactgccaacctcgagctcaactaccgggcgccggtctactcggacaatttctataccctgcataccaccctagatcaggaacgaagcacagacaccaaggcatataccaagtgtgaggtccgtgacatggcaggccaactatgtgttgaagcgacggggcttttcgttgtccctaagacactcaagctaaacatggttggggaatatttctgaaccgcgagaatattgatatctacgaatatgtggcggcctttttcgatcgtgtgacttcttcgaagcttcggccgagggttgttatcaactcaacgccggtatcccggtctcccggtctccttgaacgaagccaactggaagtaggaagctagcaaggggaaaacaggccatatacatgaattatttttgtataaatatgtgctatctgataacccctaacagatacaatcagcgtctcttgtacatatgacaaggttattaattcaatactcaaactctcccagcatttgggtttctggctatttcggggctgatccctattctggcgtaggtctccggagcagtgaaccaaccgtatcatctacatgccttctccacgttttcttccccgcatttccccagcatctttgccccagaaataccagaattatgagggaattgccaagctgcctcggtactttctggatttcaagcattcctatcccggctatctgctttaacgcgcattactccgtagcttgtcttcatttccccactctggacatttcctaacttgaaatacggaacagattcagtgtgctgaaatgaaattatattattgtggccttccttcgacactggatttaattatcaatatcgtatgcatttcagtcgaattcaattatatccaattttgttgacttggggccaaggtcaattccccgtgcttattttgtttaacattgtgctacccttgaccctcgcccatcatggcggactcaatcattcactcgagtcggccagccgacgagaaggctgtgatgcaacatgacgaatatagtgacacctcacagcatagtcaccgggtaatggctgggccgggctcagaggaagctatgcatgagtctgagaaggatatcccggtagggctcggctgcttaacctgtggttggcgacaatactgatcgtcaaaagatgacattccgtcggttcatgggtttcgctgccatggctttcctgtggaccggaagccagattccagtctacctctttggtatgtgagaaacaacatgaaagctgtgatataattttgatgcatttccactaggcggcatccctccctatatttatggagacattggtggagcagatcgatgggtctggtttgtgagtgcatacccattgaagtatagagctatgattgacgagcttctgttaggttcttgcaaacttgctcggcctcgccggtgtatgccccttcgttggatctctatcagatctaagtggacgccgcccagtcgctattattggagcatccctcatagttattggaatgataatctgcagcacggtgcacacaatgaacaacttcatcggtttgtatctgcccatatgtcgcagtacatagacgttctctaacatggatacagcgggcatggccatcgctggtgccggtgctgggatcaatgaactgacagccctggctgcaacctccgagatggcgcccactcgaaagagaggagtctatgtgtcgatccttatcttcaccatcgtaccattctgcccgtccgtgctatgggctcagcttattgcatattacagccattggcgctatgtcggtgcgttctgtgctgcgtggagtgcctttggtctgctgatcacggttctattctacttccctccgccacgagtcaattcagctggtttgagccggaaggagataattggacggatcgactttgtcggtggattgctcagcatcactggtctcattgtcttcttggctgggttgcaatggggtggatatatggtatgcttggagataccctgtgcagggctacatatcttactgacatattaatttagtatccatggacatccgcccatgtcctggcaccattgatcgttgggttccttctgcttgttgcttttgctttctgggaaatctatggagccaaataccccatttttccatctcgcctcaagcaagagcctcggattctaggccttaccctcgtcattactttcatctccggtgccaacttcttctccgtccttatgttctggcccacggaatcattcaatgtctatggccatgaccccgtggaagtgggtgttcgcagtctccctattggatttggcatcatgacaggggcatgtactgtgcttgcgcttcttagtatacttcgtgggcataacaaggaactcttgatcgttagcagcgtgatgatgactgcaggtgagttttcttgatgggtataggagttcccaaaaagctaatctgttctcctcaaaacaggatgcggtgctatgtctatcggccgcactgataatatgtatcagctttggggaattctcgtccttgccggccttggaattggaggtattgtggtgccagcctcgattattaccacaatcatttgcccggacgtgagtcatcttgctagaagggaggaaatttgcctattgacattagctttcgctaggatctgattgccactatctctgcgctcaccctctctattcgcgtggtaggcggtggcatcggctacaccatttactacaatgtcttcatctccaagtttgtccccgcggcaacacactacatcggtggtgtgatgatgaaagagctcaacatcaccgacgttaagctgattggcgaagcaattgagctgacaggtgcctcattgctaagcgagctacgcacaatccctggtattgctggcaatgagactgcttatcaaatggtcgtaggggctggtcagcttgcatatgccgaaggatataaatgggtatactatgtcagtattgcattcgggggtgtctccattgtggccgcctgtttcttgggcgacatccagaagtatatgacagaccacgttgccgtggtaatgtgagagcgtacccccaatcgcgatttaccaaaaaattgttcatttataggatatgtcttaattatgagaccaatacaacaaaattgtgattggaagatattcaagatagtagatatcaataagtagtaaaagggcaggccgccgatcatgacgcgccaagcccggcaacttttttactcgcaaacgtcaatacacgcaacttcaatcagcagccatggcatcccacccttctgctaagcggaaacctttaaatccctcagttccgcatggtgcagccgggtcgtctcgtaaacgcgccaaaacctttgatgcgcgcaccttgactgtgcagtcggccgacgccgccctctccgcaacgggcgagctcgatgtcgcggcatactctgcggctcgggcattcgagatccaggctctggaggagggaatgcagcggtcgaaaaatgcgctcacgacgcgagccttccaaaaagttccccgctctctgcgacggcggacagcgagtcataatgtgaagcgagttccgcgaagattgagggctcgggccaagcgagaggtattcattgacattgatctacaaagttccaataacagttgactaacccgctatttcaaccatgctagatggccgaggataacacacctactgtaacggcgcgcagacgcaagccatcccagatgatgcgcattcggctcgataccgcacggcggctgcaggctatcaactcgaaaacaaaggcccgacgggcggccgcaaaacaaaaacgggaccaggagaaccagacttccttggaaaaggagggaagtcatgccttcgatattgcgccacgagttcccaaaataaagaagaataagctatcgaggtctattccagcagagcctaagtaccgcaagcgccagcgatgcaagacatggctacctactcatttgtatcatgcaaagcgagctcatatggcgacaaccaaagacccgatttggcgttttgctattcccttatcccccaccgaaaaaagctatcggcctacgcaccgggctcgaggcgcccggggtgccgtggcgtgggatatgagctatatgtctactattcaggtggaaggaacagaaccagccatccaggctgtcctaacggcagtgggtattgacggggagaatgcatggggcaccaaggggaagaaatggagagctgggactcggtctctacgggcctggacttttgaaaaagatgatcccaaacgtccgaccgcaccagtaacattgatatggtgtgccaagcagcaagatgttgagatgattgatgccgacgaacctcagcccaagtcatctaagaaagatcaccgaaaactctggattagagtccatccttcagccttcctccagctgtggacggatattcttggggtttccaaatcgcaaaaccccccggtcatggtcgaagacctgcgattcgagattggcagtattgaaatcacagggccagggtctaccgagaccttgttggcggcactgaaaccgattcttgggttagatggcaatgctccatcagcgcaaagtccggaggccgtttggccatctcttctaggggtatcgaacccgtcctcactgccgcctaattctctcctctcttttgctatttctgatcctcgcctgcatttcccgccacgaacacttcacgtcccggacaatgaatcccatttgaatgaccttgccatcttactttctacgtggcatccggacaaaacccaaggtccctctatgctgttcgaccgatccactcggttaagagcggctcgtcagcttccgagccagaaggctatcaaccgacgccgcactcttgccggtcctggtgaatatccgccatcccaaccatcagatcctcaaattccgatcatgatactcgcaaacaagccacaagcccgggccaaacacagcagtgccccggggtcctggaccgtattattgccatggaaatgtgttgttccggtctggtattcaatcatgttctatccattatccagcggaggaaacccattgcttggcggtttgaagcagcagcagcagctcgccttcgaagcaggcgaggcttggttccccggagatttcccaggaacacgagctgggtgggcatgggaccaacgtgagactgcgaaatctcgacgtgactgggagcgacgtcctaaggggcggcgccccgaattcgataatatctcgttgggtgatggtcgtccaaagggcgagataggccacgggtgggcctgtgactgggaaaggcttcttcaagggccgaaacacgacgatgcttcaaaaattgccgatgtcagttcggacaaagggccaaccaagtccaaggaggccgagacccaggacccctctgctcccatcatcccacccctcaatattcacaatgttcgtctccctccggccgatagctaccaaatcctgagtaagctcgacacaacatccgtcgatgtctccacccttgccacggtctatctttctctcaccacgcgaggcacacccacaccccgtgcacgtatctaccgacttcctacggacccagatctacgccagaaatggcttgatcttggctcggcaacgatcaacaagtctagtcaatcgaagctctccaagggaggatctactgcacccgaatctgcagaggctcggcgtctccttgccatggctctcatctcacatgctgatggagagcctgactctgagccattggacgtacccaccgaagatgacctgattggatttgtgactacagggaactataatctgtccgaaggcaaagggacaggcattgggtctatccagctctcaaaggtactggctcccaatgccaagccttccgagaggagaatgtgtatcattcgggcctcgggggagaagagcgggcgtttagggatatgggaatttgtatgatatccaattcaataaaccagcagtgaatctgcccaactgtggtgttaaacactgtctgccccagtcacttgatccttggtatatctttctactggcagaaggatagccctcccaaaagttaaacgacaaagatccactctcatccatggattaactctatcctatccagatgaagacaaatggaacaaaagaaaaatgcacattctatacatacagtacagcagctccctgcccaaaatcaggtcccataaaacgtagaggcttcacatcaagccgctgtattcccgaactcaccgatctaacccacaatgcgatccacaaaagcagcctccatgcgtgcaacctcgcgcttgaaagcatcaacctccacccagcagttcaacggccggcggtcgttcaactgcagacagctggtaacatccgagcgggccttagcaacgccatcatcgagctccacaagcttcctccgtccatcaagcttgctccgcagctgctcgatctcagcagccacagagttgcgcgagacgtcacgcttgacgggccgggtagcgacagcggtctcctgcggcgcgatgactgtaggcgcggggtcgtggtggcggccggcgaaggggatccgcggtgcgtccaggttcagtgagccggctgggtagcccgaggtggaaggagcgaggggcgcggttgctgctgtgacgggcagggaggtggtgtctttggactctgagatgcgcttctcgatctcggctagggtttgctgctctcgttcgcggaggcgttgcagttcctgcgcgacgcggttttggatctccaattccaggactttggcgcgggtggagtcggtctgttcaattggtggattgtgagctttttggattgagctagggtattgctctaagccgcgttgtgctcacctctgagtttgattggagtgcgtcaactaggtttgaggagaattggacgggagagttgctgtgcatggttaggttagcattggccgtaggatgctttggatgagctccgcggtgtcgcatgtagtgatggcatcctgagagctcctttagatctactggaaccagctgcccttggcaattggtgccaattggaaggtagttcccgttctctccgccatcaagcatgaaatgccgcggaagctgaaatcgaagtcggagagcacatacctggagaacacatgttgtgagccagccgaagcctcgggcttagagtttccagcacccatttttgggggaatgtgacgagtcctgctaagatagaaagacggtgatggttcaagatgcccgctcacaacccgttcagttcggaggatgttggaggtcacgtgtttatgttagtcatcaccggccgggtcagttgctagtttcacgtgacggtacatacatctatggtcacatgatacatagtctggcatgtcaaggtcacctgaagtagttactgaagagggatatgcacgatgggcagtctagcctagcagacaagacgtttcattccgtgagtggtttctgggctagcttctctactctaggatttcacttgacatgaaggccccgagattatctctctgcctgaaagacaaggcccatactggaggattccggcttttcccactgcatacaaaatctactcacgtcctctaatcatgtggaatcaacatatcgttctccatggccgatatgagcgatattgttgatttcatctctccaaattccccggacctgtctagcaaagacagatggtctatatttgatccaggatttagagggtcatattaatcgggtttaagacgtagtattagacctagcatgattcaatattttaggttgttaagacctccaaaatgcatcatcgagagctcggccatattgactttagccatgaggaaatgatatgctattacccaactcttggttgtcaaatttcgtcaaatcaacattctttccgagacttctatatattttggtctaggcccacaccctcctaagtactacggcagaattgcaatcagactaacacaatacctcaaaggacgatagtctccgtgcggcaacagtcggtgttgtgggtagaaccatctttcttccatggttattttgctaacaccatactagagattcggatacttagccagactaatcaatatgaaaatgagcatcaagtactccgtaaaaaagtaatgtatgacatcggggtccggccatttgacgggccgatgtaacccgatcgtctctgtatctctatgaagcacaatatgcacatgcacatgcacatgctgtgctgtatataagcgtgatatggtcaactaaatatcaatgctaatgctttcaaatcacccaagtcagcatatacaggaacacacattagtggatgaatacggtgcaagatagcaggattatcccccgacgtggcatttgtatattcccgtcccctgccccggtcttagcctgtgtcgctcaccggggaagtcggggaaaatacgcagttcgaaagaattggccagtaacgacgcctccccgcactgtctaaatgtctcctgttcatagcgtcatggagcgaaaatctgggttgtgaatgccctaggaatgtagagactgctttcggctatagacaggatcccacgtagaatactccagaccaatatttgttgattgccctatagttcaaagtatgagattttgaagtacaattcaaaacaaagtaacatttccggtgaacccggcaattcccccgtaccttgacactacatcgtagatacttcatcaatagtggccattgttacggcggggagtgtactgccaaggtaccggactgacctcatggatacccccctccccggtcccctcatcccaccttatgttctgtatttcgtatcttgtttcttcactctcccccttttcttcttcccttcttcttcccaacctgtccttttccattcttttctcaattagccgataccttaactctctactctctgctcggctattctcatttcatttcttgttacactatgtcttctgcgctcttggaccaagccacgcgcattgcgcgcggctttgattaccccgccgagaatgtgcagcgcggggttgccgagtacatcaagcagtccaacgagggcttgaccaaagagggtgccactttgagccaaattcccacttttgtgactgcggtgccaaatggcacagagaaggtatgaaggcaaactatttacaatgggacttgcgcgctgattctccttgccatagggcctttatttggctgttgatcttggcggcaccaacttccgtgtgtgctcagtcctcctgcacggtgatactaccttctccctcacgcaatccaagatcctaattcctcgggaattgatggcctctggcacatcgaaggatctcttcctgttcttggcccgtcaaatcgaagcattccttcgcattcaccacaatgagcacttcgaggcccaccagctccgccgacaggagggtaacaacgaagaggacatgttcgatctgggctttaccttcagtttccccgtgcgccagtgtggtatcaaccgtggaacactgatccgttggaccaagggcttcaacatccccgatgcggttggccacgatgtctgtgcgctgcttcaggctgccattgatgatttgaatctgccagtgcgcgtggctgcactagtgaacgataccgtcggtactctcatggcccgctcatacacctcgccaggcaagactggcactttcatcgctgccattttcggaaccggtaccaacggtgcttacttggagaagaccaagaacattaccaagctccagcatatgaaggatgtccactttgacgactgcacaggcgagatgattatcaatgccgagtggggaagcttcgataaccacatgagcgttctccctaccacggtgttcgatgatgagctcgatgctgacagcaacaaccccggtgtgcagatgtttgagaagcgtgtttcgggcatgttcttaggcgaaattctgcgccgtgcgctcctatctctacaccaaaacaccgacctggaattcttcaaggccaacaagaactccaaggtcgtccttcctgaaggatctagactcttccgtcaatggggtcttgatacgagcatgcttagcccaatcgaggctgataacagcaaggacttggtggatgtgaagaccgcattgaaggatcacctcgagattgagaaccccagcctggaagagtgccaggctgtgaagatcatagttcacgccattggaaaacgtgccgctcgcctgagcgctgtcccattggctgccattctcgtgcacaccaacaagcttgagactgatgatatcatcgacattggtgtcgatggcagtctcgttgaattctatcccaattttgaagggcatattcgtgaggctttgcgcgaggttccccaggttggagtcgcaggcgacaagaagatccgcattggcgtttctaaggatggcagcggtgttggtgcagctctgattgcgctcgtcgctaacagggtcgatggccaccttaaaattccccgcgagaaataaatgacctgaactatcctatggttccctttattgttgtcttttgtttgtcggagctctccgattttcatgacctttaaagtgtccatctctctctccccagcgaagttgaaaactacgtaggttggtcgaccaccctaatgtcctcagaatctcagacctgccacaatccgttagtcccgaaacaaataccaacctgaattctttcatctttcgctcatctaaacctatggcaacactatcggctgaaatcaagattcagatcttgatagtcaattgccaacccgcaggactttcctacctgcgggtgagggcatccgcaattatcatatcacgccccattccatcaacttcccataacgaggttacatcacattggggctgaattctcaatttggagttgcggaggcttcctccgaggccttgccggcgtggaacggcatgcgatgcaagaaattgcatcgaactggcttcacacccattgtcatgtccatttcttgtctatttcttacttcacaatctcattgctttttaatgaatctctacaagtagatgaaccccaaggcggataatatcacaacatttagaccagttctattggcgttatatacttctgaagcacatcaaagtcccctatttagcatgctcatacccaatagcccgaggtgcctgtacaaaatcgatatgaccagctgggcccgtcaagaaggccgacttcccaccatcagtactcggatcatatccaatgagattaccggggaacccaatatcaaaagtagttgccgcctccaaaaactcaatctgcttatccgtaagccgaatcgacaacgcccggatattgtcatgcagatgctcaatcttgcggcctccaacaagcgggaacacattcggcgccttgcagagcacataggccaacgcaatagcagtaaccgactcaatcccatgctcagcagcaacaacggccaacgcctcggagatatgcttctcctcttccgtctgctcaccacccaccgtactacgcagaccctcgcctgccttctttcgctcctcgagctgtttagcagtctggaaatgcccactaccaagcacatcccacggcgcaagcgccatcccgaaatgccgcgccatggggatgatatcgcgctcaaagtcgcggcgcatcacgttccaccggccctggtagatggagaaaggtgttttgccgtgcgcgcgcgcatacgtgttcgccgcggaaacgacccacgccggcgaatccgaaatcccgaggtacatgaccttgccttgctcgacgaggatatggagggagtccatgatttcctcgatggaggtagtgtggtcccaccagtggaggtagaggacatcgatgaagtcagtttggagtttgcggagggagtcgcgaacgctgacgatcatgttgcgcttgtggttgccgcaggcgttgggggcgttgcccttcccgagcgcgtggctgcggtagtcagttgtgaacttggtggctagcacaatctggtcgcggttgttgcgtgcggccatccattcgccgagccaggcctcggattgttcgttctggtagttgtttgctgtgtcgatgaagttgccgccggcggcgacgaaggcgtcgagcagttcaaaggatttctctttgctcatgctacccatgaattggctccaggcgtcgccgatggacattgcaccgagctggagcggggagacgcggactcctgctgttgaggagaggacccggtaccggcccagaagggtggcgggctcaggggcagctttgaagagttcgtccattgtatagtaggtgtggtgttttgtttgttgttatgtaaatcgatggtggtgggctggactatcattcaggtcggttggagtgccttttatacttggtctttaccaatcaagcccggagataataactcggtagtatcggctatgtttgtcagcctatttcatccattgaccttgatgaccggaaataaagctccctcgtgatatatctccgttcccacaatttattgctcgtcttcctgctgcctcatacatagaccctagataagtaggcacataattatagccaatgatcaagctctacgtgctagtacagtattttgtaacgccaatcggttatttatagtgtatgaatccgtagcgccgcccctccctgtgggagacaggaaatggatattccttaaatccttaggggtgtcgagctcttgaatcaaggcgaagactactcagacgaaaaccttagaatagctatatagtgccagtatagatcagctgagcccatgccgatgctggctctaatcatctaagctgttagaatggcgagtatagccagatgagaataatcatgatactgtgccaatagtgttctacatcatagaagtatgatgaccaggaaggacaagcttaaatccgatctccgagttggttctttggttctaagccgcactaatcctaatcccgttagagccgtgtcagctgtctatcgttgcatattaacgtaatctccgcaactatccacgtcgatagaacacttgtttctggagtaaacccttgatctctcttctctgggctgttcggaccctatgtttatcctttgccccctgattcatcaacagcggtgtactcagtaatccgttacaggatgtttctctggatggagcaaggggtgatgttatgcacatccccctgttcgttgattggcgagcaatcaacatttacacgacagccgaataattgatcaccctgatccttgcattcccctgactgcaactccacctaggcaaaccgaactcgacatcttgtccgcgttcaagcgcacgttttgactcaaacccggtgtcttttctgacggcgcatgatgttcaagtctactgcgactaattatagttgtatcaccgcattttcggttgttgctattgacgaaccaatagactaatcccttgagaactagatctcgctgcctaactgcaaaaattaaatcggcagggtatgcagctcggcggaggattccatgtaccacatggactctcgaaatacgatcgcagggttctgtgtagcctggattggtccttttctccttcccaagaaatttacaggcaaggttcttcatgagacctgtacgaactggttgtgtttccaatgtcactcttggcttattttccctgtttccttttaaatcgctatgttttcctgctcttcattcgtcccaactttcgttaaatctcattacgggcttttcccctacttatttaatacttgtcttttttttcgttcattatgggcttcctcaatgccttcaaagctaaatttcgcaaggagggagatgtacctggagacaaaaccgagcacaacaatgagcacaaaaatgtggcacccaatgacgacacccattcccagtctgaaggtcagacttcaaagcccccaagtgaaaaggagagcactctagtcgatgagcctttgatgagaaatactactcccaatgatgacaccaagagtgaacttgcgagccgtaataatccaacgcctgttcacaacgactccaaccgggagctggtccccaaaaagccattcgatgagcagcccacagaagaagaaaaaaaagaggacagtgacgccgaaacgccggaggatgaggaagaatatccaaacgcatggagattgactatgatcagcattgccttgtgtctatgcgtgttctgcgtggcattggtacgcactgccaggctgctttacttgatgattatatccagctaacaccgatcctccaggacaacacaatcatagcaacagcaattcccaagatcactgatcaattcaactcactcgaggacgtcggctggtacggaagctcatatcttttgacaacatgtgccgtgtccctgatgttcggcaaactctacacgttctactctatcaagtggatatatctcagtgcgctctgcattttcgagatcggctcgctcgtttgcgctgtcactcccacctcggtcggactcatctgtggtcgagccatcgccggcctcggagcggctggtcttttctcgggctctatcctcattatcagcaagagtgtacccctagtcaagcgaccgatgtatacaggtcttattggcgcgatgtttggtattgccaatgtagctggtcctctgtatgttgctcctgttccttgattgccgaattatgctaacttctgacaggatgggaggcgcattcaccgaccacgtcacctggcgttggtgtttctatattaacttgcctatcggagcagtgactttcctcttcgtgctgtgcttcttccaagcacctaaagccatcttgaagaagaacaccttgagagaacagatcaaggagctagacctggttggctctctctttttcctgccctctatcatcagcttgttgctggcgctgcaatggggtggtaccaagtatgcatggggcagtggacgcattatcggcttatttgtggtatttggtgttctcggtctcatcttcattggggtggagatctgggccggggaccgcgcaactgtcccaccacgcctgattaagaaccgtaacgtttggggctcgacatggtatgcccttgctcttggtgcttctttcttcgtattgaccttttatgtgagccccctttccgtttctttcttccgccgttcgctcgtcaagctctaacattctcagctccctatctggttccaatcaatcaagggcgcaaccgccttgaaatccggcatcatgaatctgcccatgatcatcgcagtcgtggttgtctctatcctggctggtggcctcgtcaccacctgcggatactacactcccttcatgatcgcctcggccatcatcatgaccatcggcgcagggctcctgacaactctagagacagactcaaaccactcaaagtggatcggataccaggcaatcttcggtatcggcctgggtctgggcatgcagcagcccattatcgtcgctcagactgccctgaaggccgaagacgtacccagcggtacggctatcgtcatgttcgcccagactcttggtggcgctattttcgtttccgtcgggcagaatgtgttccaaaaccagctcatccggaacttggctcagtatgcgcctgacgaagatgctgcgaagctcgtatctgttggcgctactatgctgcgcactgttgttagtggcgattccttacaccgtgtcctggttgcctataatgctgctattacgcagaccttctatgttgctgtcgccatgggcgcattgtcgctcattgggcccatcttcgttgagtggttgtctgtcaagggcaagaaggtcgaggtagctcctgtttgaggatcaggttcggactaggcaagtcttttcgtgcacattgttcaatttcttttctttatatcttttttcccccgttctttgtggaatggtctacggaatattgtactgggccatatatgtgtccactcatttctattgtttatttataattcatgcgtatattgatatcgcataaaaagcccaatcaataccattgctttgcatgatggaatatatgtttcttgatgcttttctatttctcttctttcaccacctattgtacgcagtcagttggggcgagagcgaagcggctgtaattctattagtatccaatttcatagggttcgatagtcccagttgtcatcaaagtctaacctcttccttcctatttaggaacaaagttcatgtcttacgtacaccttgcatagagagattgagggatccctggttgtatagatataaggttagcagcaaggaggtgatatatatttttgatatcaacggtaaattgacattgaactaagctttattttgttcggccttgggtgaacccctttgacctattattgtactaattccttcgataatacgacgctgaaacagcaaaaagaagcaaaatgacacacaaaacctaaactccagcatataaactcaaataaatcccccagatcaccccacacgcacttccaaagaccactcgtcgatctacaggaatgattgtgtacattaagaccgaaacaacaggccgatacttcagacgggcactcataagaggtcgaaaatcctacagaagtcagcatctgtgtaatcagcattgttcaacagaagggcaacttaccaaaacaaccaaatcccacgattttgccaaactctctcccttcagcagattgatgataaccacaaatagcacaagatttacaattgaggcagccgtctgatcaaacaaaaatttcatgacgaagctatgcagcccagatgtcggcgctggcacccattggacatgcttttctttgtctttgtggctagggagcgaaacatcccggcggaatcttgaaaagacagaaagccatgagcggggtgagaacagagatttcagcgatcgagcactgaatgcatttgagagttcagcacgcgtaggaaaccctggatagcgcgactccagggcgcgttgccagtagaaattgggggccacgattaagatgccataggccagaaattggaggagggccagtgtatttagagtaaatggagtctaggactttgtcaatgttgtcatgagcatagaaaacagaaatttttcttactttgttgttgcgctggtcaatcagctgcgcgaggacattggagatagcattcaaaatggttgcctgcacgaacgtcacaagcaaaggtgagggcatggtgagaaggccccttggaccaaatccatgtaaatatcaatgttcgactgaacacaaatagaaaggttgaaaagggttgccaagcgcaaccgtgtcctgagaagtcgcgaggttaagggggcaaattaaggctgagagattaggcgacaactttgatgttttccactttttacatcttctgcatcgcttattgtcttgagtaacaacttgactaaattatctccgtcgaaatacaacattcggtccattcttcgccgaggtaaaatgatcggtcagcgccaggtgcccccccgcgtcttcgccctgacgatcggccaatgacatgtcaaagaggaacaccagccgcgccaatgtcagccgcatctccataaaagccatgctcttgccaatgcatccacggggcccaatactaaacggacaaaatgcgtgtcgcgcagtctcaatgctctccttggtcgtctgccaggacaatccagagcccatgcaggtggcgttctcaatccagcgctccggcatgaaggtccctggttcccggtagtatcgctcttggcggtggatggagtatgttggtgtgccgcagtccgtaccggcgggtaagaacacgccgtcgaccacggcgccaccttgcatcacttcgcggggaatcgcaccgggcaccgctggggccagacgcaacgcctcgtcgatgcatgctttgagatacaccagttcgccgagctgactgctggttatgatctcttcgacttcgttaaaggcgccgcgtacctcggcacacagcttggccaatgcatctggtctacgaactaagtagaagagtgtggctgccagtgtagtcgaggttgtatcgctgcccgcaatcatgaggacgttggactcgccccaaagctcgggcgtgctaagtccattgccggtctcagggtccttcgcgttcaacaggtaataaaagaaatccttcttggcgtcccgaccaatctgggtacgctccttagcgcgctcgttggcttcaacacgcgaattcataatgaagttccatcgatcgcgcgtcagcttgcggatgaatatctggtccagaccccatgtgtccaggggcatccaaaggccacactatgagagaatcagatgaattgttccttgacgatggataaaaaagaaatgcttaccacataatgcctgttcgcagcacgatccaccaacccaactttatatctcctcgtctcagaaataagcatgtcaaagctcttcccaaagcagagctcgcccatgacatcgtacgagagatagctaaaccaatcacccatgttcttgacattgcccttctgatcatgcgattcgaaatccccgtcatacccagcaagcacagcacacagctgacgcacatggaggagcatcacatcctccatccccttcagagcattatcagaaaaggcctggctaagaactctccttttgcgaccgtgcatggttttatcaatagcgttgtgcgtgttatacacgcccttgatagcagggaaagcattgtaaaaattggccttctgaaggcgtttcccgtgcccatagatatcgtgtaatccacggtcagagttgacagagatgaaattaggcgcaactcgtacgtgtgtcccgtactgactgtgcagcctgtgcagccagaggtggcggtcgcccttcaggccatggtagagctggacccagggtgtgatagatgcgaggaaggggccgttgatacggcgaagtgggtggatgaagcgattgtagagggtgtaggcgatggtctgtagtcaattagaagttgattgggggtatcaaaagaataggacgtaccgctactgctaatagccctaccaagcctcctaggactctttgtagagaaaagcaccccaagaccgattcaacaaacattttgtgagatgatcatgaaggaataagcatagattggctaacatgttacatatcctgtccaacatcctttatactccagctaccgccgatacccgcccccaaccgaagctgatagtcaatgatgacggatccgtactacaaaacaggtcggcctttgctccaattaagaattgccaatttctactacggatagggttctgttggctcggttataggcggttgttttaggatacattggagcgccgttgattggctatgcttaaatagccagtatctgcggggaagcttcacgtcggggtacttttgtggggaggatcctgggtttctatgttctaaggacaaaagaaatgaacttttcaatctgaggccttgtgaaatagtgagggttcattgtcattaatagtcacatagaaatgcgacataagcgatgtatcttttctatttttggcaaactgccgccatacagtagcatcccctgctagcagatattcccctccatcggctccactggctacatatatttctccaggtaagaatgccaccgttattagccgatttacagtgggtaatcagacatccgctccgaggatgccgcccttgtcaggactcaggaatgcgtcaaacacagtcaacatgcttttttttttctcgcatgaggctgtcctgcaacacttatagcaataatgaaaccgacggtaatccctataaagtgcctcccgaggtggtcgatttagagttatgcagacggcccgaaatggtagtttctgaggctcaagcgttggaacttgatgaatccatataagactatgtttgagtggtgtacccatgtattcctccatccagaatccactgctcattgtcatcgttgtcatcttgcacacgtcgccaagtctgttttcgttcggtttgctccgctgcttcagcttgctttatctcgggggcacgccacacaggtcgcatgagaccaccagccgcgagaagggggttacgactgaaagcaggttgtcctcgcgagctgtcctctgcacctccttcctcaacagggtcaggctcactgacctctggggttgattctgccggcgcagaatgatacactcggcggaccttgccacccttgatatcaagactcatcacggtcttcttcctctcccactcaggacgagctttctcgtctatctcgcgctggatgcgctgctgctttttgagcgccagtgctcgttgtgtgggtgtcatccacaacgtcgaggcgacatttggggtctcgaaatctgctgtttcatcaacaaccttagtccgacgggcattttgcgcttggaactggagcagcttgtcccggtgtgctttcgcgacatccagtttgcttggagcctcggacccggaaacaggtctaggaccgccgtcatgatgaacaccttcattgtgtacgcgcatcttctcttgtccacgctccgcccgtagttcccgaatcatgccttgcacttcctctgcggagaggagcggtgtgccacagaatgagcacggctgtagaccctcaagtgagcagatgatttttccgcagttaaggcaattgggtgccgggtcaaacactggatgtagtaacccgtagcaggagcatttgcgtttctctcccagacttggattcgtcgatacctccagcgcagcgatagccgcggtgaggtcggagatgtcattggttgtgagagctgtatttccctttgaagacgatcccgctcctccgccgtgacgtgttgacttgctcacttttgatcgcacatttggtaacatgtccgagatcgtagggccactcgccgatggtggtggcttcggggatgacacgggcaagggggaggtaatgcgcgccgaggctgtggacccacgcggcgatggtgcaagagagggagcagctggttttcgagaagacatatagtcttcttcatcggctttcttgtagccaccgcctacatcgccgtagttgtcgggtcgacgtggtgggccggcagtgtgcagcggagccttcttcttgcccttcttggctcctccgcttggccttgatacatctctgctttgtgtggaggggttctggggtggtcgctggggttctcgacgtgaattaaacgaggagatgaattctagggccgccggggagtcaccgaggaggtttttgagatggtcggcacattcctccctcgagaggctgagcgcatagtcgataacctgagaaagagaatctggatccagcgggataagctgggaaagacgaggagctgcccatgcagtaagatcagccattttagaaaaatatttaggcgttggtgaatgacaggtgaaatgcccgtggatccccgcatttattaagcgtccccggtgcaacccacccaactacataggcatcaagtctctaaacacagtgccaatcaatttcaacctgttctcggaataattacacatccaatgttagtggacatttttttttcaagtgacaaaatgggatcaggtagcgtacatgttaagctggaatccaatgagttcaaaattaagaaaagaaaatattgatattagcacaaatcagttgcatatttcttgcagtgcctctgtcggttgtatctcatgttgtcaagtaatgtacaaagcccacctccctcgtcatcattcatctatgcagatttatccgaaggaaaggccaaaccatgaccagaccaaaccagacccagagacgccatggaacataaccagcccatcaaaaacaaagctcaaacgccgcggacaccatggtagagaaaaagggtatgaaaaacaaatgaaagtttagtcggcgttctcgctcttgatgtcgtcgtcgttgtcttcaactgtgaatgattgcttgagcttactgggaccgggctttttgctggagccctttttgggtccattcagtttcttcttcttggtggggctggggctttcttcgtcctcgtctgcgtaagggcgcttgggtgctgatgaaccgggactattgccattgctagctcccccgtctgtgggagtcttattgcggccgccggtgcgaccaccacagacgcagcgttcaaggtgttgggcgagacgagtcatgacgaagtagcgcggacagataggacacttggtggttggaatttcaggaatggtactgtctcggtcacccttctttttcttggggttcggcatgactgcaaaaagcttgccgtggacatcatggccgggcaggtcaatcatggggacatttgtacagtactcaacgtggggatcgggagggggcagagaattagctccggtggtcggatacatgagtttcgggaggcggcaatctgggcacacatgctccttcacggttcgcatgggatttcctttgaggaagacttttccacggctgaaaatggccgcgtccgtctccatgcgcatacccgcaagcttcttggtgtcgagaacaacttctctcttagtatcggtcgaggtcttgctaggtgcctcctccggcatgattgcgtcttcctccgccttctgtcgggcaagaaccaccgcggaccgcatgcgcgccaccttctcttcgcggtgaactttggccacaaggtcgtggatgatattctggaatgtttcgttcaggatgtcggtagcctaaaaaaaaaggcattaggacccgttatgaattcacatcaagttcactcggggccatcataccactttagcgatcgttccggcaggataggtcggcctgcgaccaccgctgctgttggagtcggccattttcggattgcggccggagatgaatgcgccaaatatatctcgtccggacctgattgaccgacggctgtgtctgcccgcgacacaggtagtgtgtgctccgaaccgctaggtccgaggtttagttctccatgtactggaaatctatgcagggttgacgcaatgggtgcacggatgtaggagagaggaagagagaagaaatccaaaacatagaagccgaaataaaagggagaaagaagacaataaggagagctgaattgtatagcctagtgtaaggcctgatgtcagtgagcttcaataatggggcgaggtagaattaatagccagcaacaataggggaagacaatgtgatcaatgcaggtgttttatcaacgcatacaatggcaagcaggcatcgagaacaaatagggcactaacctatagaggtgtctatttgcatgcgaatcaaatatcactcggggagatgaagagacggatgaggctggagcaagttgttcactgggcttatcttatcgtatctccgcattcgctgcccagccttggaggtgcctgcccaggtggtttgttctttcacaaacgacccctgaatttgctccaagatggcataccagctgtttacaaagaatcagacaaggcaagcgacttcttcgccgtcgctctctcctcctccgaccaatcgtcaccccatgcggcctcctatccatcctcctccagtacagccgcctcaatcagccgtcgcaaacacgcctggcccaaaacattcaaaagaagagatctttgtcccatatcctcatgacattccagctggtgtggcgacaaaacacccccatataactgtcgagaaagtcagcaccgcgcatatcccttccctgacgcggatcacgggtttactccttcccatccgctacccaaactcgttctacacagcgatcataaccgatccggtgatcgcttctatttcgcgggttgctatttaccatgatcaccctgttgctgcagccccggggtccggcgcatctgccgggacggacaaggtgatagggggcattcggtgtcggctagagcgaatccggcaggcagaggactcgatcaaagaggccaaaatacaagggaatggatgtcccacgaatctctacattcagactctacatcttctctcgccataccggggccgtggcgtggcagcatcactgttgaattcgcttctatttgcatcgtcaccggacggcaatggcaacgactcataccgggtatccgagctcgtcaggcactacaatatctgctctgtcacagcacatgtccatgaggcaaacgaagaggggttggaatggtatattgcacgtgggttcaagattgacggtgatgtagccgaatactatcggcgattgaagccgtcgggtgcgaagatcgtacgactagatttaaacaggaatgagaaagatgaatcatctggtccgacagaaagcaattctcagactacagattctcccggtgaagtagaagacgaagactgggagaaggtggaggcggaggatggcgaagaaggtgaccatggaatacagcatttgaacgaatcgcaagtccttgtatatcaggatgcgccttcgcgcaagcgcaaggctgaatatgatgaccacaagcctcacctcgagtgagatgtgcttcgcatgtgtggctttctgttatacctcggataccccttgcatttgtttatatatctgatttagaatagtgcttgtgtttattcttaatgcgtgcatgatgatatttagttgaatatgagagaggatcgtgacatacactcctacgtgttggagttgagcattaaaggaactggcataatattcatataactgcaacgccatgggtatcaaatcaatagaagacaggaacgctacattagatattatagttctcggcatgcaaaaatatctcatctttcgacgagtccataatcacctgcatctgcagtttggctaccgtgttggcgacttcaactcgcatgctcggtggaccgcagacgaaaacacacgcacgacggccgaaggttttggaaaactcgttgaccatctgcgtgatgttcgggcggaagtaatcagtccgccagttatcacgtccacgtgcgtgataataagcaaaccgtggtgcatgtactggcggcggcacaggttgagatgcgccgagtcggaagtcgaaatttgaggtgccaccactatttgttgctgcggggctgtgaaggttcatgggaggctggtagaattgacgggtactgggcacatgggttgccatgtacgcattgggaagagcagcgacaccgtcttcattctcacggcgcaattccttttctatatcagggttgccggcagcttcatcgcgtatataagccgagttccgcttatcaataccctgaagcataccgtaaatcttctcctgtactatgtcccgtccaatttggtcgtcttgcttcactccggtgaggaagaaatgacagctcacaatgttagaaggtgcgtagtcacggcatattcgtagttcctcctggaaccactccatcatctcggggttcttgagcgcccaaataactttgaccgatttggtgatagccttgccatctcgaatcttcttgatgaggtccagaagttggcttgcaatggcagtaatgccacttcctccggcaaagaaaaccacgtcgtcgaaagcagccatctcgcgctgcataccaccgtatggcccttccacaaacgcgctgtatattttgtaggggccatgttccaaggctttctggaatacctcgcgtgtgaaaccttggaatggccggaaaaccagtatcatgtcacgatacttttcaccatacgcagatgggaagtcgtcgctgcaaagagaggcaatcgtgaaagggtggctctggatcacggaaatccttggtagtcgcaggtagacatactgaccaggtctccaacgcatctttgtgggaatggtgatctttatagcattttgcggaagaagggttatggctgcctcttctccgatcaaaaatgacgaacgcaaaggatgtgtccagttcaaatagaacagccggacgagatatgagatgacccaaatggcaagggttgtgaaaaggtaggcccatgatgacaggtagttcctcgtgtgccagaagagcattgccacaaagatgtacgagactgggatatggacaaagacgaaaagctcatacatccaattgcgaaagactggaagagaatggatacacaacacaagcagaggaaccagcgccgcaattccagtgccatatacataggcgtgtggtgggatacctatgctatagttgaccaaagcaccatcttcccagattggagtgatgtaaaacgggaccatatgaaccaaactgaggaagaggcagatataggctgaccagcggtgcagtccatttaaccgctcaggacctaggccagtcatcatagtgataaagtttgccttggtgctgagcgcaacaatccaggggatcatagctactgcaagcatgcctgcccggatagcgagcggtggcgaccccagcgcaattgaccaatagtataagggctgtggcacgaaacagtataaaacaacgaagacaaatgcaaccaagacaatcgctgtaaccgccaaagacggcaaaacaagctctatgttcccaaccctcaggacgggaactggtcggtagaagatccatcgcgtcaaagcaattgccttgttcaagggaactattcttgcaagaatagattcgtgcctcttaggtggagagactacggtcggtgatggaaagaattgggcgttggaagcatcagtgcctgcactcgggagctcgtactcgtccggtaccgagtcgtcgcggaagatctctggtcggttttctttatagagggcaatccgcatcttgtcgccccatttatgccagcatcggacgaaagttgtgattatcagtagcacgacggcgaaatagacaaatccgactccatattttgctgactttgaccatggatctcgctgcatctcagccgcctcggctgtagtcgtcgatgcagtgatcgcaacattgatgcgcttggcaatagtgctcagcattttgaaatgccttagtcggtaccgatagtgatatcttcctgagatttttctagtcagatccatcccaagaaaagtcttgcacggggtaacctacctttaggtatcacccacgcataagaggcttcctctcttatactatagtcgaactgagctcatatctttagtagagctatcaatattgatttcatcaaagtcaaggcaacggaatgggagttttcgagggaaattccgtctaaagtatgaaaaaaggaagcggggagtcacacaagcttgcagtctcggcactgtgatagcctaagcccaacaacggaatattgtggctggtcagacattgacccaatcgaaatcggtgattgcagaccaatttctagagcacaggcgtctcgccatggtgatagtggttgcagtgcggagggatatggtgtgacggtttaggctttagcgctctgaagcccaatcacacggggcgatatcagcaacagagtgattcgatgtgactgagccgcattagcgtggtggagaagatgcagagctcattgatatttttgtcgaagatgctcatccaattataattgaactatgatgcaggtatacaaaatagttcataatctccggctggtcgtgccggagattagccgaaattatggaagccatcacaactatgttgtatgtatgaataggctctatctgggttagcgtctatgactccgtgaaatgctatagcgcgaatagatcgaagaagctgtctatgcggactacatgtagggtttagtagccgaagcggatagcaaccagtagtagaatgtagttcccttgacgatgaactcacagtgatatattgacgaattgtaggaattcagtactggaaaaccagaggtttcaacatttcaacattctcaagactgtcatttccggcattggagctgaggcacttcgtcggttcctgcatcaaatggttttatcatgtagtatacagcagatatctgtcgtataatatcgtgtgatatccagactgaaacatcagacacccctttatctagaaatttgttcttgttctcttctcataaagttgttcctccagggctgctgtgaccccgcgaaactcttggcagataaacagttggtgcctggggcaacagtgacagcttcgaccgccttcgataggaaattattctgccatctcatgcttgtcggctttttctgcatcttcgatcatttccatatcagtctttgacgaaagtagagacgtttcatttagccatggcatcctccactactgccagtaatctgacacctccgtcattgtcccttccaccatcacaattcgctcgcctccaacctcacgcctaccttctcgcccacctctctcctccaccagcgagcaatcaaccctcaatccgcgcgaacggtcgtgccgcctcacaatttcgtgtcacatccgccaatgccggctctctaactcacacaaacggcagcgcagtcgtacgaatcggcgacacagccgccgtctgcggcgttcgcgcagagatcctacacaccaaggacatcgcttcctggagcgtattgcaggcctcgtcggagcacaatcttgacaattcaaattatgcgggagtctccgagtcccaagatgaggaagatcgaggtcatattcaagatctgaacctactcgttcccaacctttccctcagcactggctgcgcgccaggctttacacccggtgcaccaccttctgcgctggctcagtcgctctcccaccaacttctttcacttctgcacaccacacgtctcgttcgagcagaagacttgcgcatctggtatcagccaccgaatctggagtcagaagaattcggcaatgcgggtgaggggatggacgtggatacagaagagagcgggggccccgagcgggagattaaggctttctgggtgctctacatcgatgtcatgatcatttctctggctggaaacccattcgacgcggcctgggcctctgtcctggctgcgcttcgggacacgaagcttcccagggcctggtgggatgccgataacgaaacggtcctctgctcggacgatgttgccgatgcacgaaagttgtctctgcgtggcttgcctgttgccagctctttctgttcgttcgagggcgacgccgctgctggctggcgggcggttgtcattcccagtgctgaggagcagaagcagaagaagagcgcacagcgaaggtggattcttgcggacccggatggatacgaggagggtttaagtcaagagcgggcttctgttgttgttgataaagagaatgggaaaacggtcattgtgaagatggagaaacatggtggttggactgtggacagtgatgatctgcgccagcttgtggatgtttctgctcagagatgggatgagatgaagcggatactagatcaatgctgatcgatttgatatgccttacaaatgaatgataccactacaagtatttcttgacattttgcttttgggatggagctgtgcatcggactagatggaaatggtggttgtcatgtgaatagtctacaaaatattgaattgatcacttcgctagtttgctgaactcttattcatcatgctgcgtcgtcttctcttcaacggcggttcgttgtccccattagcatccctagaaacagacacctctgcatcctcttcctctgtggaagttgtcggcgaattgaccagcatttcacgtttaggcttgccagggattgatacggtgaaggagatcaggtccgcgctatcacggtccttcttgggcttcttcgtcttggcattacgcccgccttctttcgatgatttcgtttcagatttcgagtcatcaatgttctcttctttgactttcatagcccgcattgcattctcgtcttttgatgcacgcaggtagtcaccggagaagatgcgcataaagaggctcttctcttgagaagaaggcttgtcctcggcttcattttccttcttttcctcttcaatgtccacctcctcggcatcagagaagtcccacattgtgtcaatctcacctcgaataaacgcagtaccccagagcgatatcaaaacacccggtaccaaatagagaagagctggctgagcatgattcgaatattgcatggcaaggagagtggtgaccattccaacaacataaccggctatgctagctttaaagtagatctttggaaaacaccgtgcatcatagtagggaggctgaagttccggctggagtggcttgactggtggcgcccagaaccgctctccccaagcgccgattgctgactgatactcaggcttgacagttgcttggtccgacctttcaagacgtgccatttgagcgcctttccgctggtaataaaggaataggtcgaagcgtagtgacagcccaatcatcattcccggaatgacaatgtcccccagtccaagcatggccaacggcacagagccaggagcatcacgagaggtgggcggccggggaaacaggagcttgatcggtacatccaacttggttgcaacagtgaccatcaacggtgtgaagaagacaaagtagatatcatagaaaaataaggatcccataatgagcgttcctgtccagaacgtggagggagacatgaattgcagggtgccatagcagaagcagaaaccgaggaagttggtcaaccaccatgggttcgccacgaatgcaaagtatcctaccgccgacaatgcaagacttccgctgacgatatcaaggagaccaacgagacatctaaagtcaaataagccacgtatatggcctcgcacctttagacgctggtaagagacatttcggcacttccaaagcagtcctaataccatacttgggagtggcagataacccaaaatcccaggaagaggtgaattccggatagagtgtgacttggctggatggtcctcggatgccatgaaaaggtgttcggactgtttcgctttccacaatcgtccaccttggcgataatatctaggaaacacaaatgaacgaatcatcaatagcacatccttcaggaatgcaaaggcaaagaagagtcccatttgagagaagtagaaactaaggatcttgttcaagatggctggatcttccagccatttgatcaccaagtataaaccacccagggtgagtcccgcagtcaacgggaatatcagggcatctgatggctcaagcccttccatcttctgcaaagggccatgtccttcttcatcatccgtgtcattttcatctttgtccttgtcgctttgtttcttcgcgggtttagcggcggaagaaggtcttgtcaaagaagcatgtgcaccgatccaaattggaaaaagagcggaaacaagtaggtgtccgtaagttggaagaagtggtctcagacggtcgaagtggtagaaggcttgtccaagaagttcggcgacagggctgacgtcagccatggtggacagaaaattgttatgagcacaggaaaatgataggcaattgaagccaggaaacaaagacagaatgaatcagaccataatgcccacgaaatgtgggaattctttgaggttggttaccagcgcttagtgaccaggcacaatttaattcaccgctttctctgaagatccctacaacatcatcgtgccaggcgcccaaaacacatgccgtgtgttggtgagccccaatcaacgataattttcactcaacgataaaattacaaaatcaggtagcttttgtatagtatactaaggaagatacaaaacctcttccttttctttaactttgacaattgtaaattgtagtgtggattattgaatctatagatagggcggtactggttttctgccagacaaattggcccaatggggtcgctgcactcatccgtatcgttggtgatttcgtttctcgcaaactctcagctctgttcctcggctcttttatttacgattctacgctacatcctcatcatgacaactgaggtggcttttgacacgtctatggtaaattgtacttcgttgttctcccaatcacttactaacccatagcaggggtccttctccgtggagctctacaatacacatgcgcccaaggtatgagctcattctatagctcctagagagtcctcactaatgtctttctcttcagacatgcaagaactttgcaaccctcgctgaacgtggctactacaacaatgtcatcttccatcgcatcattcctgacttcatggtccaaactggcgatcccactggcaccggtcgaggaggcagctccatctacggcgagaaatttgaggatgagattcgcggagagcttaaacacaccggcgctggaattctgagcatggcgaacagtggaccgaacaccaacggcagtcagttcttcatcactctcgcgccgacaccctggctggacgggaaccacacgattttcggtcgagtgaaaaatggcatgagagtgatccagcgtatgggactggtcaagaccggtgcggaggacaagccagtggacgagttaaagatcattcgggctcgtgtagttgaagcaggcacacaagagtgaacgtcgtgcgctgcagcttattccatcggattacggtggagggtcatgcacatcaagtatcttctcttgggggaaaaaaaacaagtgttacccaatttgtgcggtgcagttgcaggcacaaccctcggcgcgcccggcccaagtcatgctagagcagcattgtcttgttgttgtctcgaggtgctctatccaagccccctggactctacgaactacaatatcagagtgacagagcaaggtatcactctaataatgagattatggatgtatcactacaaaacgaaccgcttctatcaaatgtctccatcaagagcagcagatacagagtgacaagaaatcttatctaccactcccaaacgaagtccagtgaaggactgcgtcaatgaagaccaggctaccatagtatagtaacccattctgtgcagaacaccgggagtggtatggaaggagaaaagtgttccgccgaaatttctgttcatatagcggtgtagcctaacctcttttggaactgctgagtaatctatggtctcacctaggtagttaagcataacttcccgcctgaagcagataggctctatttggttcggttgtctctattatcgaagtaaaccagcgtaagcatcatctcctggtgttggtagctacacataagatagagcaaaaaataaattccgatatcggtgtgggtggctcgcttacatcaatagaagttgttgcgacaatcattcatttttcatcttcccccttcttgatcgaggagatagaggatagctctgctcagtgccgctgaatgacactgccatggtcttcatcttcatagttgcattgtaacgactgaccgtgcccgtccgctctgcgaaaggcgaacgaacatctggtcgcaattatcacccatgagacgttttccttgaccattcccaaccgtttatattctttcaatgaccgggttttcttaaagtatgcgaaactgctcaggttatctatatgccatccaagctttcaactggtgaagcgattctagtatgttgcagaatagctcttcctcctgtacacctggagtatatatattttcagaggcatcctaaactatccaactcgtagacaaacagagaaaagtcaatgtaggagatactcaaatcgtataattcccgtaccattcatgtcactgatgaaaagccgagttcattttaaccacgccgtacatgtgttttctttatgcaatgttcttcgacgtcgattttagtcctatggtctctaagtggggactaggtgaccgccttcgctcacttcccgcgtttttctccttcaatttttttattctcttcttctttccccccaaaactcaagtttgtgggatttccactgtttgagcttattggaagactgagaatgtttcagtggcattaaataatcatctcccaattctcaacctcctgagagcttgagctgccaaatttggctgtaatactcaaacttacctgcagctagagcttcctgattttcataccatggaaactctgtcagacacgacttgggatgtgatcattcttgggactgggatttaccagtcacttctggcactgtgagtgacttttctagggtggcggtgagttgagcactcacactcccaaagggccctctcacgatctggaaagaaggttcttcacatggactcaaaccagtactatggtggttcagatgcagccttcagtcttgatgaggcccagcagtgggtagagaaagtcaataaaggtgagttaccctttttatggctggttggctcatggctaatattatgttgccaaatagacacacatatatcaccgttcaaagatgcctcaatcttcaaacaggatgcaccccctttgtccgatgatacaagcatttctcccaaacttgcatctagtcgtgcttacactttgtccctgtccccgtatttcctatatgcccgttctcaactaatgtcagcgctcgtatcctcgaaggtctttcgccagctggagtttatggctgttggaagctggtggatttacgcccctgaacagctagagtctgaaaatgacaaactcggtgcagaaaagattctctatcgcgtacctggcaaccgggaggatgtgtttgctgcaaatcatatcagcatgaagtctaagagaaccctcatgcgattattgcgtcatatcacgaaacccaatgaggatgacgcttcaaatgaagatgccgatatgtcaatgtccttgagcgattatcttgcttccaagttcagcgtcccggaggaacttcacaatcctctgctgtcgctgtccctgtcgcaactttctcagcatgatacttccgccagctatgctttgcccaggatccaaagacatttgtcatccattggccatcttggccccgggtttggagctgtgattcctaagtatggcggtggagctgagatactgcaagctgcctgtcgggcatccgctgtggggggcggtgtatatgccctggatacgcaggttaatgattgcttatggcgcacaggctctgaacattccgagtaccgttttctgttggaactggccaatgaagggtctgttcaggcgaaatacttgtttacctcgatgtcggatgcctgttctaaagagaggtcaacacccttggtcgaggttgcccgttcgatcagcgttgtgtcggctactttcccgtctcttttccctctaacagttgagggtgctcctgtgcccgcaactgcagttctcatgtttccaggggatacgttgggcagcccaaattcgccgccggtctatctccaggttcattcgagcgacactggcgagtgtccacagcagcagagtaagtcattccctatacagtccagcatgatatcccctcccgcccgctcgtatgatgatttttttcaaaaacttatctacattgcctgaacttgctatgttgaaaaccttttcacctgatcacgagcactctccaaatttgtttcttcagcaatattgtcgttcatatggctaattgcatgtcacaggtgttatctattgcagtgtggcactacctgggccggaaggccaagctcttatcgagtctgctgtggatagactaattcgggcagaaggtatctcggccaacgtgctgtggtccttgcgatatacccatagcggctgtatcagcaatggtgagccccggcatctcacggtcggggatggagttcctgacggctaccgtttccctccgtcgagccttgacttggcattcgaagatgacacattcgaccttgtaaaagaggcttggaagatagtcgtaggagatgaagttgatgatgccgattttatgatgtttgacgatcgcgatggcacttctgaccaatgatccgtagcatgctttttttatgatcatactattacccatatttccctacagaaatagttgatgaaatggtttctgttcgtttctagggaggatcgttatataaagtatctaatgctctaagaatcctctacaaagttatcgatttactgcccaacaatctcacacggtgttagatgttattatataaaatatgtatgctgtaactaactagttatggatcgcatgtgacgcataattaatatcggcgcaaagcagttggcagaacgccccatacgtcatgtcatgttaacctgattgtcgatatagatcttccgaatatctgttgttttcttgaacgtagattccaactaatctttgctggaataaaacttctatcctacactctcatcgatcgcaaacatatacctatcctcacaatgccactcgataatgtcaccggcggcgtgactggacagcttcctgccgaccaggcccaatcaacaacaagcggagtggtcaagaagagcgtaccaaaaaagctccaccgaacgacgaaggacttgaccgaccctgccctcccaggtcaatttccttccgacgatgctcccccaaaaggcgagggaatcgacaatgatctctcgttttcatcgatatggtccaccataacagcatggttctctacactattccctcgcgcctttgattatctcgagtcctacattcagggactggtcgcctggctcctccctccaccccgccaggctgcgttatatgaagctgcactgaagcgccctgccgcaacaaccttaatcgtttgccaaatgatttgctgtggagttcctctactggtgttcttggctggcgtgtttgtctttgctgcggtgtcgatattgctctgggctattctgtccttgctcattcttggtccggtgttgttggtcacaagcatgatgggcatgtctctgtggggctggggttggatcctctatgggttggtcaaatggattgatcggcgattcttgggtggcataattgcacgcttttggctttctcagacaaattcggagtcagacgatgtagaggatgagcccaaggaggagaaaaaggacgagtaatgtttgcgaatttctcggagtttagaggacatgtgattctgtattctgaattatttagggcataaaattgacattgacattgaacactgaagagcacgatatcttattcatatacacgctcagaatattcgaagagacacaaatggtaccccgatgaaaccctcaggcatcgtatatgtgatgttgtaaaatacaaattcgttgacagagtgatcggtgttgtaagtgatcgtatatttaggttgcgcgtttgtcaagaccttgatgttcaaaccaggtagaccttctagtccagtcacattgaacccgttgttgactgtgaggccactgaacaagaagttgaaagaaacaggaccgtgtgtagatgttgcatttggatatgagatattcaaagaccgaggggcggccacagcatgaatagatgattctgtaacccaatgggaaatgcagccaatttcatgatcatcaatagcccactggatgactgcaggattgaattgactggggttgatactgggacccccgacaactgtctcggcaagagtttctgcaccaatagtcacgttcttggacatccaagcagtgatattgcgaggataagtatcaaagggcggcgagtaagcctgcgaggtatacatatgctcgccagggaatttgagcaaattttcctttgcctttgcaggtagcgatttcaccatttcaggcattgacagggcgaatagaggatataacgccaaatcatcttgatgaaacatccccagctcctgctgagggacgggggcttgttcgcggccaataacaccccaaataacagcaccaataagagatgcatactccttcatatcgtagccatatgagcgatcccaagggccagcaacattcttcagattcgcattataaagctgagcgagttcattccagctgtatttgagcatctccggtccatacttcttcaacaagctgtcacttgtcccatactggttccagagcgccagtgcccacatggcaacaccagcgtatgtcggagaattgaattcagacaatgtgtggtgcatactccagaggtcgtagatttcctgtgcgaatttctcaccagagctggttaagtttgcatctccgactcgtgcaccaacccagttttggagaatggttcgcatcaaccagggattggagtaacaagggtaagaattgtcgccatcaactcccccgacacgatagagatcacccttggctgcgatctgcagggacttttccaccttggagaccgtcgctgctggaaggagatggccgtaatcattcaaagccacaatccaggcacatcctacaaaatcgcggatgtttggatcccactgaccataattatattagcgaaatagtggattagactaggcataatcagcttaccgagctgtatgggccatcattgggatatttcagtgtcccaggctccggttctgaaggtgcttgttgataatccccataccactgtttagacggatcgacatattgaccagagatgacattgtcgaagatgcggacggcttttgcaacatcaccgggtccgtttctggctagcaactgaggtgcataccaggctgtatgccgactatcatagcgtcccggactactggttgaggtgatcaaatagccggtctcgttgtcccagtatttgtcattccattcaatagcagcattgaacatttccaccgcgtgcgatgacgcaccaaacctggatgaccagctgtctagtggagcagcagagacgatcccggtgttatggacggcattgaatcccagaaggaccagtgatagcttcatgatgtgttggcaatatgaaaatggcaggcaaagagtgacttgcgaaagaagctcaatttctttcgctcaacttccccctgtgcctttgctgtatttatagcattttcaatttggctttcggcatatctcgtcaggtcgattgcattgacactgccgatgcctagcatattatgtttatctcagcgatatccaaacattcagaccccggtgatttcgccgtgatctccgaatatgccggttgctatccagagaatgattcaagtattctcgccatcttacactactctcacccttatctttagtgatcggcatccggtaattcctcagcattgccgatttatacccctccctgaatccttcagagcttccccgcaaaagcgaaaaataattccacctatgatcttatacaaagccgcagaaaagataagaccagctccatttgctacacatataatataagtataattacttgagccacttggaaccgaaagcgataatctgataccgagtcacaaacaatacagagagcgcgagaatcccaacgccaaaggcccactttgagtgagcgaaagtcgtatcattgccatcccgatcaaatggcggggtgacgggtgccatcattttgtgagccttctgaaccgagtaggggggataccgcgcagcgagaagcccctccaaccatgaaggcacggcgttgatatgcgtacggagatgagagaaagtcaagataccgtgcgggccatgatagcgaccatggccggagttcccaacaccaccgaatggcacatcgcgagcagctatatggagaccgcagtcgttgaaggtcacgcctccggactgggtttcgttcaagatgcgagccttttcggattcttgagtagtgaatgcgtagatcgcgagtggatgctctcctgaacgcgtccgagagagagcagtatcgaagtctgcatcaatgatggggagaatcgggccgaaaagctcttcggagagaagggaatcgccgggtttaacgccggtgatgattgttggtgcgaagtacagactttgacgatcccgctggccaccatagacgatttttccggaggtctgttgaagtagattgtcaaggcggtcgaagttacgctggttgatgatgtgggtgtaatgctctgcattgtcggctttgcctcctaggaacgtgtcaaagtatcgaatcaaatcagcgacaaggcgttctcgtacacttgggtggactagaacgtggtttacattcaagcaaacctgtgttcagtcgagacgagttagttgatgactggaacgtgaatggtgtgagcctacctgtccagcattcatgaatttagtaacggcaatgtgttttgcggcgagatcgagattcgccgattctgcgacaatagcaggacattgaccacccaattcaagtgtgacgggagtcagatgctttgctgctgctgcatggatgattttggcaatattgggagatccagtgtagaaaatgtgatcaaagcgatgctcaaggatatatcccatttcttgtgggccagcggaaatacaccggatcgcatcttggtccatgtattggggaataatttccatcaggacatcttgagtggcacatactacgtccgatggtttgagaatgacggcacacccagcagcaatcgcagcagccattggctgcaggagcagactgacggggaaattccatgcgccgataatcagagtcacaccaagaggttccttgcggacagtggctcttcctacgaagttgagaggatcggatttttccggtctttcatccttcgtccactcatccagttttttgagggtgcgtagaatatccgcttggatattagcgcagtcgccgatgtaggcttcttgatagtgtttgtgtagatcgatatagagagcgttgcagatgcgcgtcttgttgtcctcaatcatccaccaagcccgtttcagttgacgacgtctccattccttgctcttggtggtgccagatgcaaaagtaccctgtacaatttgatacgcctagaaaatgtgaggggtgatatcaaatagtatatggatgagatttacctgatcgaactcggccgtagtgctgaaacccatggtgagctgtagagatgtggagaggtgggaggaagacgaggttatggggaatactcacacagccgtgttgaacatgacctcctgaggaccctggtctaagactgcagttcattttataaatatatcatgcatgattccgtttggttaatttagattgaccttgagatttttatggtcgcgaaatgagtctcggggtgagatttgtacgctccccgaggccgaagtgcattattattgcattaggaaatagaatcgccatttccctttcctggatgtcgaagatatctactccgtagagtatgccgatctgaaaactaggaactggatattctcgttgaaacgtcgggtttggccatgctaatatgcacagttggggttctatctactatgtagtctataactatccagtttagatatacaccgaagcctgcaatagctgtttttatagcatttgccgtctgttcaatcatcttagcatcaataagctacctctagcctagtaggagactctagattccttatccaaagccccttttgccaccaccaaaccctttagataaacaccaaagtgggtattccaatatcgcagcgaatagaaaccaacaaagataggaatgccaataaatacagagacacttatctccttggctcacatataacaggggagctgctcctccactcatgcggggtagacgttgaacaatgactgcaatttcgagagctcgtacaggttgctggacatgtcgtgcacgacgtatcaaatgtgacggtaatttcccatcaagtcctgcatcaacacagtcctaactgaaatcttggttagaaacccatccaatttgccgtcgttgcgcccgtaacaatgccccatgcggatacggacttcgtctggtctggcacgaggaatctttagcccgaggcatctgtcatggaagagcaggggtatggtccaagcgaaaagatattcgaaagagggaactggaacaagtagaagatacatcatcgccatggacggagcatacggccgaccggacttggatgtttctgaacacgacaatgaccgatctccagatccatttcgatggtacccagcccaattacaaaggcatgaagccaatttctcaaccaagcccgttgtcgccttggctgaataccatagctcctggccagcgatcagattgcgatccggtgcttatgtcttatttcgaacacatcatctgcagcagctcaactctcgtcgatagcgcaagttacaatccatatcgatatctcatactccctatggccctacagtctgagggactataccacgctgctctagccatctcagccaataccctcaagttgtcggatcagcgataccggcttccggcattggaacatcatcaccgggcactaaatcacctgcgcggtctactgaatcaagatagctggacggaaaatgagctggatgaaatgcttgggctggtcttgatgttatgctggttcgatgtaagattatgccttgcttcctttactatgagaatctcctaattccgttgcagatatcagacagcagtcgcccttcatgggtcacccacctcaacggattccaaaatttaatgcggacacgaaaagaacgccccggtcgctcatgtcacagtcaagaattggcaagtttcttcaatcgttatttcgtcttccatttagttctagcccgcactgcgtttcggctcacccctgccccatcccatatatcgcctctcttgccggacagtatactggaaaaatcagacatcatcgatccgtacatgggattgagccccgctctcttattgatgatcgatcaagtagccgaactagcgtggtctcgtgaggatggcaacataaaaatcaaccgtaaagatgttcatcaactcaagacggacctcgatagtcttcaacaaaggatacccacagagcatatcgatccgaacatggagtgtgcggcaatcgcagaggcaaacaggctcggtgcccttcttcttctgcacgaaatctgttcgaccaaagctccgattaatcgctccggtatcccgacattggaatccgaagagaagaatgtttatgttgaacggatattgaccctgatgttggaaaagaagggaaatatgatgcgaactgcagctacgcctttatggcctctcttcttggcggggtgctgtgcctgcagggaagaggagagggtcattgtgttgcagttgtttaaagagctggagggtattcgtcgatttggggtatgtataatcttctgtctctttctagttgattgactaacattattattccccagaacattacccctgcgattgaagttgtcgaaatggtctggcgccagcgggatctgtcggtgcaagatgaaagaaaactccagaagaagcttaatgcacagcggcagaatgatcccctgcaagagagccggttttcgtgggagcatgctatggtcatgctgggtgggtggaagctcagcttgacatgagcttttatgtgggtaatgaagggttttattatgttcttgtatatattatttgagggatggtctcaatttgtatagcccgcagtcaaactgtgtttaattgttcgacttcttgcacctttcatttagacaaatcatagtttagaagcatggcttctttcatgtgtatgtctacccttccaccctgtaaggtcgctcaactccatttccggatccaagtgcgctaggttcttcgcagtactcttttgtccagccctccatttccattgacgcacaatatctgggtcaagagttccctcgagcaaatccgcgacatatttcccaacgacaggaaggaacttgaacccatgtgctgagccaccggttgccaggaagagactttgatgagtgggatgaggcgtgacaaggaaatgccgatcagctgtatcagcatcccagcaaagccgtgtatagcagaagggtctgtctgcaagctcgggaaacacgcgccgtaaattccggcgcatctgagcttcgatctcgagagggaggccatcggtgggtgcctgcacgaaggtgtgtgggacagaagtggtgataccagacttggtggtttgcacgttggtgatgaattgactgtgagccatcttgaatatcccatcttcaagaggtgggaagaagtagcccagctcgaggttatccataatgggcattgaggcatagtgtttcgtttcagaaggggtgagctggatatgagcgacactgtgtcccttggcagtcaactggtccttcacgtctagcagtgaaggtgtccacgcgcctgcggctaggatgaccacatccgcctcatgtctcgtgccatccgcagtgacgactcccttgcactcgcccgtgatatcatctagtatcaactcttgcaccctcccctttgtgtcccccgaaatatattccacccctttctcctgagcagcgcctgccatccgctcgatggctgtaccagaagctgcccacccggctgttgggttccacacattgatattccacccgtccagcttgcccgtgacaacagaccagcgagcacggatctggtccggcgtgagcttctcaagaccctgtactccaagcttcttgcatgtctcaatcgaaccctcgacaaagggccgggacaggttcgctgcgctcaggatccacccggggacatgatagagcccacgaaacagcggccaagaccgccacgcttcgatagattcaattccaagacgtgcgtatagcggttcgttgtaatcgctgcggatgatcttactgatatcggtggaggctgcttcgcaggaggggggtgcgtatgggtcgagcacgcggatggaggtgtagccgcgctgtgaaaggtggtatgcggtcgaaatgccgaagcagccggcaccgacaatgaggattcgcgtgtctttttccatcatgtgagctggattgttgtggtgactaggtttgacttctcaaactttgagggtggcgtcgccatatttattgaggcatttccgccttctttcggagaatctgatttcgctaccagcttcctcatgaacaatcaaaggtatcatggagatggtctcgtgtgcggggaaataatcgactgcttcgttccgaccttccgataaaggtctcactgcccggagatactcggagaatctccgagtggatgctcgtttcgacctgcattcttttacctttaccccagcatttcccccaactcaaagattgcccaggtgcttaatcttatttgtttccgtggctctgggatggaaggaagtatgccaaagataacaacgttctctcgggcgacaatgaaatgaatggctgatatcgcagaaaattggctaatcgtacaaagtgtccactaataactagatcattcgtgacaaacttcttacttggatatgctgagagcttatagatacacaggtatcatacttattaacctatagacgttttaacggtctacgggtctaggtctagaatatcgagtttcttctgaatcataggttgtcctctagaagagatagacaatcttggcttatttcagagtgatatgataaaatattgactaattcctggttcaaagggtacatgtatatcagaattgccattcattccattgcgtacatttgccactctatccatacagtatccttatcaacagtaacccacatctccacacacatcccaaggctcactatcctaataagtataccggaaagagcgtttttctttatcagtcagatccgagaatgcagcttcggatatctccacatttgactcggcttccttgtcacggcggtagttttcccatcggcaaagagccccataggaaataatggcaactatagccacaacaagacaggccagaagaccctcatatcctcgagagtaggatggtgcatcatcggaacggaaacactggggaccaatgatattgccaatacaatacgccaagaagaagatggcgttcatggtcaactttttgctatggccactggtattggccattggaagtgaagttgacaacacgtacggcgcccagtaggtgtagaagacatagtatgccgccagaagcccatgctggttctcacgcggcagcttccacatcagaatagcgcagatcatggggaccaagttggccagggcgataatggtacaacgggagttgggcacgctagcagctaggaagcccagcatgatctgccaaaccgttgcaagcacaccggtggggataccaaggacggtggtgatcaatgaggagtaccctagacccttcacaataatagccgagaaagtcaccagaccaccattggggatgttctgggccagcgaaaacagcgccagaagccaagtcttggggtcgagtaaacactcgcgcacttggtaccacttgatggttttgtcttccatgccggtattgttgtctttgacgcgctcgaggcagacgaacttctcgcggtccgagaagtaccagcattgcacgggcgaatcgggcaagaatatgtacaaaacgacggaccaaaggacggaaaatccacctagcacaaggaagagcaatctccagggtcctaccgacgtgttcgtttggccgataccatagctgatcaagcccgagaagacggaggagagctgattgaaccagaatgcgacacgaagaggctgctcgcttgtcttccaccacatgacagtcaaaatgctggagattgggaacacggcggcttccgtcatgcccattaagaagcgcacggcggctaggcccccaaagttctgcgttgccgcagtacacaacagcagaattgcccagcccaggaccatgcccacatacaatttagccacaggaagccgctgaatgagtaacgctgtagggtactcaaaggcaaggtatccaaagtagaagattgagcctacccaagagtactgatcgccggtcaagtgggtatctgtcttcatgccgtagatggccgcatttgagatgatgactttatcaatagcggcgagaaccactgtcaccatgatcaagggaatgaggatcagatcgattttccaaagcacacggcgcgcttcggcctcggtgacaggttccaccgcaatggcagggtccaggtgagcgaggaagtgtgccgcaacatctttgccgttggttttctcttgggcttcaaggatttctccttcttgggccttttcgtgatcaagggcgagttgaatctcgggagggttggtatgtttttcgtctgccatagtaaaaagggtgtatctgtatcaggaggtagaaagggatgcgtacacatcgaaaacgaaggagatagtcatttgggatggttttatactttggaacatcagagtgaaagataggtccaaggttacccagacggttatcatggaaagtgaagtgaacgaaagtttgggtgcgccaggaaggtcggaccgactgataagcgcatctccacgttcctctccccgctctatctcggtgttcaccagccggtggattagattgtggcgttctttttttcgtcaagttacttcgcttcgacctgctgattagttctaatggagctaatggagcttcataaaaggaagctttggtccttgcgttctcagggtatctgaacatatcccatatcatgtctacccaattaggtgccccaagcatcaagatcgccatcggtgagtcacttgcaactttataattcatatgatatagcaaggtgttaatatcccttctagatcgtggtggtactttcaccgactgtctaggtattgttgatggtcgcgatgaggaaatcgtcgtcaaactgctttcgcaggatccagccaactatgccgatgctccgattgagggcatccggcgtattctggagcaagcaacaggcaaaacctttccccgcgatcaaaaactcacaactgccgacttctcggatgttagcatccgcatgggaacaacagtcgctaccaatgctttgctcgagcgcaagggagaacgtcatgcactcttgatcacaaagggcttcaaagatgctttgcgtattggaacccagtctcgaccaaagctgtttgcactcaacatccaacgtcctgatgttttgtatgaggatgtggtcgagattgatgagcgtgtcacaattgaggattatcaacagaatcccaccccggacaaagagagtctgcaaaagtctttgcaatcagatgcctgtttgaaaaaaggtgttagtggagaagtggttcgcgtcttggagcctcttgacgaggaacgtacaaagcagagccttcagcagctgtatgaaaagggctatcgctctatcgcggtctgtttggttcactcatacacattccaagaccatgaacttgcaattgagaagattgccaaggaaatcggattcactcagatctccctttctagccaactcttgcccatgattaagatgacatctcgtggtgcttcggctacggcagatgcgtacttgacgccagtcattcagcgttatattcaaggcttccgctcgggtttcaaggacggactgagctctgccaatacacgctgcgaattcatgcagagtgatggcggtttggctaattttgaaaagtatgttgacattcaattactaggaatgtagaaaagaaattttactaatctcttatagattcactggtcttcgtgcgatcttgtctggcccagcaggcggtgttgtgggatacgcgggaacttcattcgatgagacagatagaaagcctgtcattgggtgagtctaaatttaccttattctatgaggggatcatcaactaactttccagattcgatatgggcggtactagcacagacgtctccagatatgacggaaagctggaacacaccttcgagaacaatatctccggtgtcacagtgatggcaccccaattagacatcaatacggtagctgccggcggtggtagtattctcttctggcgacatggattgtttgcagttggtcccgagtctgcaagtgcccacccagggccagcatgttaccgcaaaggaggccctttgactgtgactgatgccaatcttttccttggccgccttcttccagcatacttccctaagatcttcggcccgaacgagaacgaagccctcgatgtcgaaatcacgcggaagaagttcacggagctcgcagagcagatcaatgctgaaaccggacaaaacaagtccccggaagagatcgcgttgggcttcattcaagtagccaacgagtctatggcaaagcctatccgagcccttacagaggcacgtgggtacgatacttccgcgcataacctggcctgcttcggtggtgccggaggacagcatgcttgcgccattgcctcttcgttgtctattggaactgtcatcatccatcgattctcgtctattctctctgcctacggcatggctcttgcggatgttgttcacgaggctcaagagccagcatcaggagtgctggatcagacagccatggaaagcatcactaagcgtatcgctgcgttgaagtcaaaggtcactactgcgttaaccacggacggcattgatgaaactcagattcagcatgagatttacctcaatctgcgataccagggtaccgacaacttgctgatggtgctcgaacctgaacacggagactttattgctgagtttgtcaaagagcacgagcgcgaattttctttcacattccccggtcgtaacattctcgtcgaagatatccgagtccgaggcgttggaaaggcaacctctattgcgccagaggcacctcaacaagaactcaaatcagtcagcaaaaagcccgtgggcccagagaagcaggatgattcatcttctgtctactttgccggcgtcggtgaagtcgctacgccggtcttcttcctggataacatgcaaccgggatatgtccttgagggtcctgcgatgatcattgataaaactcaaactattgttgttgagccaaatgccactgctacaattctgtcccggcatgtgatcttggatgttcaatcttcgaagaagcagactgcggatgcaacagtcgtggatcctatcagattgtctatctttggtcatcgcttcatgtccgtcgctgatcagatgagtcgcatgttccaaaaaacctccgtgtcaacaaatatcaaagaacgactggacttctcctgtgccgtgttctctcccgatggaaaattggttgcaaacgcgccgaatgtgccagtacatctaggaagtaagtcatccccatttagaaaaattctcttttgaccaagagaacttcatgctaatttcttcttcaggtatggagtatgctgtccggtatcagcatgagaaattcggaggcaatttgaagcctggcgatcacattctcaccaaccatcctcttgccggtggaacacatcttcccgacattactattatcactccagtctgggatggtgagggcaaaaacattgtcttctatgttgcctcccgtggtcaccatggtaagcatgaattattctcatttcccttcactatttcactatttgtcgtgtcatgctaatcaaaagcagctgaaattggcggcatcgccccgggatctatgccttcaaacagcaaaatgctgtacgaggaaggtgccatgacaatgggcttcaaggtggtatcagaaggccgctttgatgaggagatagtccggaagttcctatatgatgagcccgcttcgtatcccgattgcagtggcacccggacatacaacgacaacgtttcagatttgaaggctgctattgcagcaaaccacaagggtgcacagctcctggaagctctggtgatcgagaacacattggaagtagtccacttctacatggacgcgatcaagcgcaacgcggaggttgctgtccgtgaactgctcaagtccattggtcgtaagaacaacggcgttcctctccgattctctgacttcatggacgacggcaccgagatcaagctggaaattcgcattgattccgagactgggtctgccgacttcgactttacaggcacgggccgggaaacattcaactgcctcaatgcccctaaagccatcgcccactcagctatcatctatagtctgcgggcgctgatcgatgttgatattcccctcaaccagggctgtcttgccccggtcaatgtgataattccctctggtacacttctcaatccatctgggcatgccgccgtctgcgccggtaatcctattacctcgcagcgtattacagatgtcgttcttggtgcattcaatgcctgtgctgcttcacaaggctgctgcaacatcatctcatttggtatgggtggcgtcgatcccaagaccggcattgaggtacctggatttggcgttggcgagacaatctgcggcggctcaggtgctggaccatcctggaatggcacgtcgggcgtgcatgtccacatgacaaacacacgcatcacagatgcagaggtctacgagctacggtacccggtcatcctccgcaggttttgtatccgagatggctctggcggtgttggtcgcttccgcggtggagatggtgttatccgtgagctggagttccgcatgcctctttcggtgtctatgctaagtgaacggcgcgtttaccgtccgtatgggttggcgggaggtgagtccggacaagcaggcttgaatctttacctcaagaaggagctcgacggaacggagagaatgatcaatattggtggcaagatggagcttatggtccaacctggggagcggattctgattcatacgtgagtggtctacatctttcctccttcatctgaatatatatgctgacaattcttttgatttagacctggaggtggtggctggggtaaggcatccaacgatgaactagtagcgagtgacagcaagagtcatcagaactcttcggctttccagccccgaggaagtgtgcatgcattcagtgtcgctgccgaggcggcaatgtgacattgggatatagatgaggatttttgaatcatgtagccagagatttgcatttttgatttaacattatgcagtgatgtctttcatgaattattgatagtttccttgtgcagatataaaaacttattagcagaccatgactaccgctcgactttagaagatcccaatgattcttttcactgttactgtaagtcttctcatttagcaagggtctgattcttcgtccgtggttcaatctatcgcattggcatctttgatctgacataagagatgcaaatggtcgtactgcttctaaaatgctcaataagaccgaagtcgccaaagtgctggagaatgcacataaataggaaaataacaagtccatcagtactataaggttgaagttacgaagagtcgtttcggttaagggatgctatgagttcgaactaatggaggtaaaggtcacaggagcaatatgactgtcttcaactaaaagtgtgcaagtcaaagaatgtgcctgtagctatatggcccccacgtgaccgtagcccggcgaaccagtgtttaccaaaagttttggctccctcgatgcccgacaaatttattctttcgcgcattcatctcgcagaacctccctttattcaactcttacttccgcacacatattgactccacatttactcaacctcttgactgcatcccatctaccgtcatggagtaccactccgtcccaccggaggaacgtgctagagacgaagatggcaacctcctcccttggggttatgtttacaaagagtatgttcaatgtatcgtgtagctcctcttttaccgaagctaacaaatatgtctcagtgaatctcgcaaccctcgacgaccacccgaagaatcaggaccattcggcaagagaagaaatgctcgatacgataatgctcgctcacgaacacggactggaacaccagcaaagcgcgagaaccccaatgttgctgagtttggtcgactattctcacagcaacaacaggaggccgagaaaacacacggcttgcccaagtcatcatcatcatccagtcttgacaatccacggaagcaaacagagaaggtcgcaaccgaatgcatactctatgggtacaaaaacaaggacaacgagtggaaggtgatcgaaaaatttgagcgcatctcccaaggcacgatctgcgaagactaccctcgcaacgacccgaattcatcgatcaactacacccatctattgagcgggggtgacgtcgtcatccgaaacctgtcggctgatgcaaatcgcaagtcgaagcgctatgccggtggataccactggatcaaggtcacatacgactcgacccagtccgcagaccgcgcgcgcttctactcgccacaggaaattgatggccacctggtcttttgcgagctgtacaatggccacggcccagccgaagacgccccaatccctgcagattctgttgccagcagtcggattcgcaacaaagcaccgcgcaccttgaccacctcgcactcgaccgcctttctctccaaccccagcaaagatcaggaccgcatgacattgcctcgatcctttgccatgaacaacctttccagtgtaccggatatgccagaagacgaaaggcactcggtcgattcttcaacggtcgctggtacctccgacgatacaatgacatccactactgcaacctctgcaactgccactgccacaccctcgttccagcaaagcagtttcaatacaacaacttcttcgtcaacatggacgacaggagcttcgtcaagtaacgatcgcgcctcgatccaccaacgccgagctcccgatcaggccgaacccaccgccaacaacgaattcatgacgcatattccgactgtccgtcgcaccaagctgcgccctatgctcgaggcactccctccacagccgaccatgactgagcgcatcctccgctcaatccccatcctgagctggtttacaggtgacattgtgggcgagggtccggtgctccgcgaggatggcacgttcgattcggaaaaatctggcatttattggaggttctggcatacgttcgattatttcatgagaacggatatgtgcggactgaaggaggatagttgaggcgacatgaaggccattgagcactatggaaatggaataccttttcgtcttttgttattcactacatcacggatctttcgccccaattgcgaagtcttgcgcgcgatgaacctaaaaaccgaatcgctacgcagcttgaagggccagtcctcaacaatactgcgcgcgtcgcgcaaggcatgggggtcaatggatttgcggtaaaatggataatgtgtacgatagctgcgtcagatgcagacataatgaactgtcctgtcgagggaccgcgcaaaattgatatcccgtagaacagtaacaagtacaattcctcaaacttctgcttcaacaacttttcgggtggttaatcctcgagctgtcagaagtaacatccccctttccgtcgccgagtgcatcaacaacgctggcacgttataaacccatgcatcaaccctgcccggaggaagagaccaaacagccagaagaaaaaaagagaaaaagaatcaacaaaaaacaactctcaaaccagagcttaaatttcattgatcatagacgaaagtttttaaagactcgatttagttcgcatctaggcgtgtttattccttagtctcgaagttctcgccctcgacaaggtcggggatgtcatcctcctcatcgtcctccttcttatcaccctgctgcttctgcatgttctggtagctctcggcgagcttacgcagggaagcgagggagtcggggccgagctggttcaggatgttggggacgagctcagtgagctccttctcctcgccgttgccgtacagggcgaaggtgttggaagggacggcaccgtggactattgcgatgaagtgattagactttttttgttcttcttctttccttcttctctttgttttgaaaaggtcaaggtcgggtttcggggtggtttctactcaccacgggggttggcgaagtggatgacgttgccgtcctccttgaacatgttgacctcctcgataccctggatgggctggacgttcagcttcttgagggcggcctggagcttcttgtcatcggcgccggagttgcggacgaccttcttgaccttgcggcggggagtacccttgccactgtaagattgttagtccgagttcgacattggacggttgaaaaatgtggtatcggtgtgggtaagtgggtgaatgtgtggtggggggatgtgaattaggaggggtccgaaaagatcgaaggaatgcgaggatgacagggccgagagtcagactggattttctgaggcatgcgatatgcgatatctatgttcggttcgaaatttggatatagtgcgtcgcatagattcgagaatcaagaatccgtagtctgactatcggcagtgtcgaatccgagtattgcaattcgaaaattcgtttcattcgtagggaatcgagaggttgggataaaaacaatgctggatagaatatacataccctgtcaagaagaatcatgttagctatcaaatttgcacagttcaatgtccaccaagacatgtaaattgcagttcttgagacatgaccaagctccagggcgaccgattccacagaatcgcaactccacgtcattgcccagttcatatctcaagctgagatatgatttagaatagagagaaacataccgatgcgaacgctcgcctgcattctagccaactttgcctgatccatgatgaagtcgggaggggtgatcgcctggcgcggaattagctggtgattcggggaaaatccaagatttagagagaattgcagagtcaattattctgacaatcaatctctattgcataccgttaaaaaggagttgagggggagatggtaggaggaaacgtgaagtggaagtgggtggaatgatgatgcatccccaagagttttgtgtggggagttagccagaatattcgctaatgcgccgatttgggttaacgggctgtttgtgtttcaacgtctacacttctacatgttttacaaatcgactcgatcgcgataacactctatttgttgttcttcctggtgattttggctattcgcaagttccagggttgttggattgtgggatatttggtgctcggctaaaccctaatcgggctgtcttcggagtatatgacgaacatgggacttatcctgacgctttgcacccattttcattccactatacgctgttggtcatgttctcgtggatccccggcttgcatctcgcttggatgatcttgtatgtgccctacgtgttcgagcaaggtctcattgtctgggacgagcatgttgcgcgcgtaacctgcgaggtggactccagcgtctgggtgtggcaggaggtcttccggggagggcttgcggagcgtccattggccgggcacttatctaggggctaggacagcatgaccggcatcgaaatccatgcttccggctacgtaaaggcgggagaatggcagcgcgccttgcagaacaatgtgaattgtaaaaagcagagcaaagctaagtcgcagataatatttcagtcatattatacatccatatatacacccatatatatatacctcgatggttccattcattgcttcgaaacctgagtctcggtccaatcccagagcttgtgagccaattgcgcgttctgcgcaggcgcagtgccaccactgcgatacccaacgggagtatagtaagctccattgatgagatcctcccttggcgtgccagccgcccaaagagaattcagggctccactagcgacacttcggaagaacgtggaaccaacagctgtcagagtatacttcatcgtcgagttaaggttcttcgcatatctatagagcccgctgtcaaccgctccgggatgcacagcaatagacaagatatcaggatgccggcgggctagctcggatgcaaagaggatattagctaatttggaagcgccgtaacgcgtccaggtactggcagctaataagccaggggtagatgtaatttcctcaaaggtggaagggctaacagcgagagccgccgaagcgacagtcacgacccggacatcggggacctcacccttggcacgctggagatcagcggtcttctgcagagtaggcagaagcagttttgtgagcagaaagtgaccgatatggtttgtgccgagctggacctcgaagccctcctccgtcgtagtaggcgggttgcccatcgtgcccgcatttaggattaggatatccaggcgatcgttatcggtctggaacttgtctgcggcggtgtggatagatttgaaggaggacagatcgagtgcgaggaagcggatatcggcgggggaggagagctggctttgtagcgattcgattgcttcgcgcgctttgctctcggtgcgggcggccatgtagatgcgtgacgggcgatgcttggcgagttgaaggatggtctctttgcctaggccggtattgcctagatcaatcaatcgcggtgtcagtcttctagaagctgtagatagatagaaagaagacatatattgtacctcctgttacaagcacgaccttgccgtccaggctgcgaatgtcgcgctctggctggaacgatgccccgaaatagccgaaagtggcttcattcaaggtcgggccaaagctcgacagtgcctccagaggatgacgcaagctgtaggtcgcaaagccacgagtggctataatatcacggagatccatagttccagatccaattggagaatgtgaggggttgtagaagttggaagcaggttagctcaggggggatttaaagtaggaaaagtcaatcatgactaggggccaaggaataacgccgtccattcttcgcatgtgaagtttttcagatcttgatcttatcaagatttccttcctggcccgtaaagaaacaatacggagtggacttgcatttatccctttgtggatctttgtgcatctcacatcagaccatgtcgaattcatccgccaagctagttagttaaaccccgctgcaggttgatcccccttgtatctctcgagactctctcccggccacttgtcctgtagactttctactccttgttttcttttccttgacgtaacacaaaaattccgaagtgtctgactatagtcttttataaagcaatctacgtgacatcaagcgaaatccaaccacaatgcgatttctttgcttgcacggtgccggcacaaatggcgaagtaagcatttcagtagctttaacatagaagatactgaccagctacagatctttgaaatccaaacaggaggcatccgccaattactacagaaaagtggtcaccgcttccaattcatgaacggaaagataaacgcgaaagtccaagagggtgagctctattttctacacacgcctaagccatttactaaccccaactccaacccagaactcgaaggcatagtggatggccccttctataaccactacaccagaggtacctcaccaggctccaccgtccttgaagccttcgaccacaccaagcaattcatcgcagaagaaggcccattcgatgcggtgataggcttttcacaaggcgcggcactagcagctgcacttttaatccaccagagcaagacgtacccagatgagccgccgctattccgtgcagcggtgtttatttgcagtgcgatgccatgggagagttccggactggagcagatttcgccgcagccagatatctatccgattaccattccgacggcgaatatcgttggtaaagccgatgcgctgttccccgagggagtcaagttatttgagctttgtgagcccactaaggcggctttctatgatcatggttctaagcatatggttccgtttgatatgaagaatacggaggagatggttagagttatcgaggagactgtcgcgaaggctatcaggggttagctgagatgatgggaacttgtggatataggcaactattgactttctacaattccacctatgtttccaacctcgtaaagtttatagattgttattcttctctgccttgtctaaactactacagaatttagacaatttcaagaactaatcatgccaagcgcctaaagcaccttccctgtaagattggtgataattcgactttgatcaatggtaatgtgcgaagtggataaataccgggaaatgatatccaaaagtgactcttcaaatgagacgctaggttatgtactatcttgtgcatatcgcatatactccgtaatattataaggtatgatcttggagtgagcaaagttggaaatgattatttccgacctgtggttagttatgcgatgctgcatgtgtcatgactctggccctgagattggttgtctctcggtggaccatcgttggccgaacagcgccttaagtagggcttttggtaagtttgtgcaggttgaaagtggacctcccagcaaagcccgggaactagtaagaatgggtttactaaaattgcataactaactagttatttaactagctatctaaaaagtctgtctcggcggagtcagcggctaataagaaaaacagttctcactaaccaagggcgaagtgggtgctattacttcatttgatagccttgcagtggatgatgccctactggccttcgaggacactctttcgattataggaaaaaggtggggttgatgcatgagcctgaccttccaagagatatgctagtcaagctggccgacgctatcctccatagcgagttggctacgcgaaaatcgcttcaagctgtggttgttggattgggctgttctgatgaccatgtctgtctgtatcagcagctcacactgatctttggcttcctttttagtctttcacaatttgtttctcgggcaccaaggtcatcattattgataggcacgttttttaaagccttcgagggattgataaatcattattatcttttgcgttcgtgagaaagaagcacatcgtttcatgttcgatagatgcattgcattgactgatcgagacaaaggcctcagatggggtatatgaaatatagtgcaagagattatacaagtttccacagcatactaataataatggtagcatccatgggtgagattgtcatcagttctcattgtgggctttagtacggagtacatcgaaataaatatccgatcaatccgccttgtatacttcgtacttttccatatcggagattgcaatagatttgttttctgtttgtcgcaacttgaggcttgtttcatagattaatcatttacttccttgaaaggtaccccgtacatgtagcgccaagtcaacgagacctcggcggaaaatgttgccaaatgccagaaatgccagttgctactaataatagcacgtgggcgggttcctcgagcaacacacttctcacacttgtatgaacaggcagccgtataatccgtataataagaaaaaagctttggagacaaactatttctgcaccgaggaatatctacggaatacaaagtcatgtgttttacacatgtacttgtatgaagtataaaatacatcgactatcatgcttatagtaaactccattgtgcctgtttgtgatagataattttcttttgatcatcccaccacgatctaggctgattcaacgccactggcttcgcagccaataaatgccaatggtcctagacttgaaaatatttaacattcaatcccaaagaccaaaaccgggagcctgctttgtactgagaacgccacaacacgtgactctgggcaaagccgcctcagcggcaactcacaacttgtcagcttcactccagacaacaccgttaatctcttcccctctgtcacctgccgtcgcgctgtatcccaatctttatcagcatacaatagctattccccatacacaccgtctgcgttgattttagtcccccagactccccctttactgcgcctccccatcaaaacagcgcaacccctagtgctcctgcgagttcgtctagacactcccaatatccggcaatcaaaaatctgagcttctctcaaattcattcacgactctcataatggctgcctccgaacaaccttacgacccctatatcccatctggctccgctggagcccccgctgccaccgggcagaatggcaaccagcgaaccgccgctttgcaagcagtaagtcaatcctcgacaatctcttgactcctagcgacctcagccagtgagcaaacagacaaatatggtctggtggatagcgaatgcttgctttcttgttgagctatcaaaatgcgaaggctggggcggttgattttcgcaatggggctgacatggtatcatctatagcaaatcgatgatactgttggtgtgatgcgcgaaaacatcaacaaggtttcccaacgtggtgagaacttggattctctccaggacaagaccgacaacctcgccgtctcggcccagggcttccgccgaggtgccaatcgcgttcgcaaagacatgtggtggaaggacatgaagatgcgcgtgtgtctagtcatctgtgtgatcgttctcctgattgtcattattgtgccgtccggtaagcgctccttggcattcccctacctgactctccagcgcgacactaacaccgtccacagtggttgccactaagcactaagcactaagcacttcaactgcgcgcgacttacgacttatctttggacatgggatcttgaattttactgggcttactgttgctgggcccgtgtggccttttgttttcttcacagccgctaatacctcctgctgtttttttctgggcgtgttttcgatgaccaaatcctctttgacttttccatgcaacgaagcgagatcatccgattttgggttgtgtcacctgcgacccggtcgacgggtgaagatgtaaatgatacttccatgacgccgtgttcaagtatgcttaccacacaaccattcgggtgctttctgactgcaatgaatctcccttatcgtgttttgaagcgaatttcgattgccgagtcttgctgtacctgaatagcatcatagctatacaatgtagaacgtcaatgtagatccacactgagcaaagacaacgtccagccttgtgcatacataccggttcatgagtgtgcacaagtgatgaaggaagaagggcgaccgagtccggcagagattggggtctctccgcttttggctagtatttacattccctgtttcgtagacaaggcggttgaccattacagggctgagggctagcagacttggaagtccacgtggcccaagacccgtctgacccgtgaagttccaattcgccaatgagaatatccttccaggaacccgttatgtatgctttacagagtatgtacatacatatgctcgagctctacttggcattaatctaacatgatctaaatgtttccaccgtggatctcctgctatacgagtgcagcagcgcaatcctggcccctcctgacgaatccttcgggaattcatcaaccgacagtaagaaaaaatcagataataatggagactcttggcacgagaacgagtgtccaccgattcctcagttagaccacttagagaagccctcgtatatatgtcggcaggaagcgcagagtgctaggtccagccagagtggagggaagtggatagcggtgacctaacggaacgagtgagaggcagggacaggatcagataactgagactaaacccaaggaggatgacgtttcacgatctccgagcagaggaagtgggctttttcggaggtcatactctctcttgaggaagtctaaggagattccaagttccagggttgatatccgagcccgtgaagaaactttttcttttatggagtttatttcgcccggttgcggcgtcacacaaatgttaatattgtacagagaaataaaagaagaccagggaaaataatcctctaggagttcttgagacaaaagaaataaaaatcaacaattcccatgtatacgaaacgtaaaagaatcccaattgcaaacaaagatggggagataaattgctcgctagagagggggtccaccgccttctccccgtcattgggtcaaagttatcgctccgaggcccggccgatgatctgaaaaatatctctcttgactcaactttctcacttaccaccttccttctacctacttatacatatttggggcctctcccacccagggccgaccgtgagaccattgaggctgccgcatgtgcgttgccaagatgatgtcccttcgctccgctgtgcggagagcttcgtgcaagcccctccgttctctctccgcaccgactgctcctctgcgagtctcagtaaagactgccacatccctgcgccagactcgcaattactctcgctcgacggatcctcacctgacctctacccgcagcaccgtcgtgcaactgttgagcaacattggctctaagcgcgaggtccagcagtacctgtcacacttcacctccgtgtcctctcagcagttcgccgtgatcaaggttggcggcgctattattactgagcacctccagaccctgtcatccgcgcttgcgttccttaaccatgtcggtctgtacccgatcgtcgtccacggtgccggcccccagcttaaccgcatgctggaggcggccggcgtggagcctcatttcgaggatggaatccgagtgactgacggcaagaccctggccctcgcccgcaagctcttcctggaggagaacatgaagctggttgaggagctcgagcgcatcggtatccgtgcccgtcccattaccgcgggcgttttttcggccgattacctcgacaagcctaagtacaatttggtcggtaagatcaacggtgttgacaaggcgcccattgagtcagccattgccgctggatgtctgcccatcctgacctccatggccgagacccccgacggtcaggtgctcaatgtcaatgctgatgtggctgccggcgaacttgcccgtgccttgcagcccctcaagatcgtctacctggctgagaagggcggtttgttcaacggtgataccggtgagaagatctccgctatcaaccttgacgaggagtacgaccacctgatgagtcagtggtgggtgcgccacggcactcgcctgaagatcaaggagatgaaggatctccttagcgatctacctcgctcatctagcgtcgctattatccaccctgccgatctccagaaggaactcttcactgactccggcgctggtaccctgatccgccgcggtaacaaggtccatgtgaagacctctctggccgactttggagatatgaaggctctaaaggaggtgctgattcgtgaccgtgagggcctcgatgcccgggccgttgttgaccgctacgtcgagggcatgaaggagaaagacttcaagatctactacgacgagcctatggaagctttggccgttgtgctgcccccgcaacccaactctcagatggctcacttggccactttcaccatcaccaagtctggttggttgactaacgttgcggacaacgtcttcgccagcatcaagaaagatttccccaagctggcatggactgtcaaggaggacgacgagaacctgacctggttcttcgataaggccgatggcagcttgagccatgatggccaggtcctgttctggtacggcgccgcgaacggcgaggaagttaagcagctagttcaggagttcaacgcgcacggtcgccaaatgttcggtgacattaaccttgaggcgcgccttcaccgcgctgctgaggctgccgccaacatcggcaagggcttcggcgctagcggtgcttctcttgagcagaaacgtgcgttctcaaccaccaccaacgccctgcgcatgacccgtgctaagcgtcccgccgttgccgtgaactctttccgcacttatgccactaccaaccccaaccctcctcttggagagaagaacatttccaacacccagcccgccaaggttgctctcattggtgcccgtggttacactggccaggccctgatcaacttgctcaatgctcaccctaacatggatcttcgtcatgtctcgtcacgcgagctggctggtaagaagctccagggctacgagaaacgcgagatcatctacgagaatctcagccccgaagatgtccgcaagatgtctgccaacggtgaaattgactgctgggtgatggctctgcccaatggtatttgcaagccttttgtcgatgccgttgacgaaggttccaagacgggcaacgtcattattgacctcagcgctgattaccgcttcgatcctaactggacgtacggtcttcccgagctgattgagcggtctaagattgcccgggccactcgcattgccaaccctggatgctacgccaccgctgctcagcttggaattgctcctcttgttccgttccttggcggccagcccaccaccttcggtgtctctggatactccggggcgggtaccaagcctagccccaagaacgacgtgcagttccttaccaacaacctcatcccctacagtctgactgaccacatccacgagcgtgagatcagttcacagctgggcaccagcattgcgttcattcctcacgtcgcggtgtggttccagggtatctccgtaagtgcctactgatagctcattgattctcaccattgctgacatataatatcaagcactctatcagcattcctctgaagcagaagatgacctcccgcgatatccgcaacctctaccaggatcgctacgctggtgagaagctcgtcaagatcgtgggcgaagctcctcttgtcaaagatattgccggccgccacggtgttgagatcggtggatttgccgtccactccagcggcgagcgcgtcgttgtctgcgctacgattgacaacctactgaagggtgccgctacccagtgcttgcgtaagttgctgaacccatccacttcatcagccatgatgctaacaaccctcatagaaaacatgaacttggctctaggctactccgagtacgagggtatccctcttgactaagctctcactcgaagccagtgacgagtagttatcagagtgtgtttgtgtgttgttcttgcatgtcttttgtctcataccccccgtgaatttatacatcgctctgggttggagatttctgggtgcttcctatctatttacagatcttccatagttgattttgtctacgcttatacttgtgtcaaaagagtgcggtttctgttggtctcagtccattttgctccctagaattctgctgcctcctttcgggttatcggtttttgtcccttgtgcttaactaacatatgggcccccaaaagagcctcgagaaaagtaaaatttctttcttctaatgttgtggttttgcccccaggagtgttctttatcccaggaccatatacgactcgatttgattcattgaacgattggaaacggggaagcagttcaatcgatgtaattagaaaacaatatatgttaatgggaacttttgacttgtactcatcagtgctatagttgtaagcgtggactttatgttgggatacataacgcatctgttcacgcctcaagggtcttgtgctcaagctgggacgcacactctctcttgatcaaccttccactttctccctcttccttcaagttctatcctcattttctgtactctttcatccgtgcttatcgagggtactttcatcgtacctttcactgtctttcgtccaaaactactccagaactgactgcacattactctggcccatgggcaaactcgaggccaccaacctgcggctgtgattcctcttcaacttcccctcccatcaaaaattatttcgcttgaaccgttaacctatccataacccgcatctcagaatccgagccgtgtggagaatcgagggcctgggtttcactcgagttcacttgagccacaaccatgttctacagccatgaaagtaagtcgaagaatccttgtggacgatctttatcgaaataaacactcacctgtttgtcgcactctagtcctcacctcgccagagcatggtgtcgcgacaatatggtaagaaaactcagggcttccacatatccacatccaggactaacaataccctcatcacaggctagtcgcaactctgggatcccggtcgatcgctagaagactgaacagaaaagccatccaggacgttgatgtccccaatgcatgccgagtaatcatcaatccagacgcacctatggctcttcgactgcaggggagcttgctgtaagatctgccgataagtgatgtctccagaggtatgctgacaacgtgcctgtgttaggtacggcgtctctcgagtgtacaatcaacagtgtgggtacacgctgctcgacacacaggcgatgcacgacaaaatggtttccaagttgaagatcatcgcgggcagtgggcttgatcccgccgccggacagaccaggtgattcccactgattcaattttcaagacattggccgaacactaacttcattccagggccagcaatctgatactaccttacgatccgtctttcctacccgagacagctcttccaggtcttgaaattgacttgtcctacttcactgtctccacggaagacagctcaagccaactgagtggtctctggaccaagtcgcccaataatagcctgtctggcacttcgcaactttcaagcctgcaccttgagctcccatcagatgatatcctgggagagggtactatcctagggattgatgagattaatggctctgcgcagaaacaagataccttcggtaacatggcagggttagggctgggaaatgaagagggcgttctccttcaacctgacttcgaatttgacgaggatggtaatatcatcgagctcggtgctagagagcagtctcctcgtggaaggaagtccaccgttcgctcaagggaaagtgaagaaccgatggaggaccaacaacaacggctctgggaagactcggtgagtaccaaacatccatgccgtaaccacaaatatgtctactgactctgttatagatgcagattgacgacaaggaggctagagtggccgagactaacgacatgatggagctcgacacgcagaccgcggttccaacaattctccagacaaatgaaggccaggatggggctgaagaaacaattgagatccaaacagcgaggacccgccgcgtcaggcgcccgaaggaaatcatctccgacgacagcacggcacttcgaaatatgacgctggcccaatggaacaatgaatacgttgcgaacatgatccaagcactaaagcaaaagcagcaaaacaagactccaaccatttcgaagaagaacgctgctttctgggttttcggtcaggggatcggctcggttggagtcggactgggaatggaccatgaactgcacccgctcaacttctactcaggcgaggatctgttcgaagccgttggtggataccctcagcgaaaacgaggaaagcgcagcgcagatgacgatgaaatatcagagggacgtcgagtacgcgcgagagacgaacaagcagagcatctcagccgtgagaatatcgaccgcctcaacatggaagttgaactcggccgtgatgccccttcgagtctatttgacgaccactcgtcccagatgccatggaacatcaccgcttctattcaaagctctcggcaaagacatcgattcggcagtgtcagcgagctgtcttctcaaggacgtaagcctcgaagccgtctcaccagtgccagtccgcttgccgggcgcagctatctcgtgggacaagaccaacttgatctggagctcctgggtgatttcggagacgacctagaccttacccggtatcttgaaggggagctcgcgacagaccgcgagaatatcacctcactctcccccagtaaacgttctgctgtcgaacgggctaagtcaactctcgatcgggaaagcttgaatttcatagagtttatgaagaccaagatgggtactgctaacgatggcaaagcaggaaatgcacaaagcccgaacagcaacgcgtctagtccggtcgcaaccagactcggcccgaccacattcgcgagtcttcttcctcctgggagtacaacgcgagctgtcgcgactcaggctttgatgaatgttctcacgctcgctacaaagggtgtgttacatgtccaccaagacgggtacatcgacgacagtaccgagtgggcagtccgctatcgctatggcgagattttcctacgactggagtgagcgtgaaacgtgcatactaggttttgcgatgcgaccacgaatgacgtcgaggaactcgtgtgcgaatggttcctatttcaatgagaatgaagagaaacggccatgacgattgatctatgaacgaacctattgacgcgatctgtgctggcgtattacatcaccacggaatgcgcagatggaataacatttttacagtgcgatgtgcgtaagagcgaaggcaataactgggtatgcgaggatatttattgcccatcacatttatactccccaatcttaccaggaacctgtatgttgtaactgaatatgtagttgacagtattgcgtatgggatacgcccacagattcagtaacagtaataatacccgatgttttgatcgcgaaccctggaaatggaagtatacgaaagtacgaaagtacgcaagtatacggggacgtatacgaagtataaagatcaataatcctcggctttgcttctgattgtatgagattcacatagaatttgtcttcaccaaatccaatcataataggctctgatccgagtgtgcctcgtttgccctgaattctccgactcggcggtaggcttacatcttacacttctgacatggaggtttagaatagttcattgcagattagctgtcgaatagggattattcaaggaattgctttttattaggcatctattcataagtatatactagtgttatttctagaatatcccgaccggtctcatccagccgatgtaagccggtaagtgatagataaagtgaatggaaagaggctaataagtgaaacatgcactcaatacacattctaatagacttgatagagtaattaatagacagtataactacaaatgtaccataacgacatagatgtataggtaatatacctccagtacaagtaccggtcgcacgtaccgtaagcagtgctccaaattacgcagggtgcgtaacccgcgtattctcccgtcttcgtctttccattttcttttcttctctctccctgacccctccaactttacaactcatacgcgcctttacccattcaaagttattctcgcgaccttctttgcttactatcgtggatactcttcctctcattactcccctaatcatgggtcgtaccgtcgaccaggaggtacacgcggcgtttgtcgagtttcgcgccaaggaagatgacaaggtgcgtgactgtgtatttcgtaatatttcacccacgacctgtccgtcactaacatacggaaacccgttttttagtgtctctccgttcagtgtatatactgccaacaaattcgagcaaagaacacttcgcgacagaaacaacatctccttgaatgtcccggtctgcgcggtcaccccaacgcgcctcagccttcccagcccgcccaggccgcccctaacggaatcggtccccccaatggctaccccggcactcccaatggcccaaccgcaacctcgacaggtccaactggtcctggtactatcccaactcccaatggcaccatcatgaccaatggtgtcaaccctcatgcgactccgttgcagaccccgttgggggccctccagaaccgcgccgcaatggcgaccccggttgcgcctaccggagctccgtctgcaccgccaagcgccgtgccctcgcgcccgactcccaagccaaagaccaagacagcaagctcgagcttgcccgcgcccccactagacgatgtgcacgcagctttcgttgaattccgcgcaaaggaagaagacaaggtatgacgaaggaactgggcgaccatagaccttggaacatacaagctaacagtgcggaatagtgcctgtccgttcaatgcatttactgccagcaagttcgcgcgaagaacactagtcgccagcgccagcatctgctcgaatgccctacctatctcagcgtgatgaaggactcgatccccgccaacaatctgctccacacattccccgagggcgatgtcgcccgatcacttcagattcccgcgccatcgctggagctggatttccgcatgagcatcaaaatgaaccccaaggtgtctgttggtcccagcgtgtggggccaacgagagtgggtttcgttcatcggcggccaatgggccggtcgatggggtaagggtgttgttctggtaagactgaatcccaacctccaatcattacttgtccggtgtctaaccttttaaaaacagcccggtggtcaagatacacagattgtgaccaaggattccactaccaaccttcgtgcgagttatatcctccagactgtcgatgagccacctgcatttatcatcgtgcgcacagaaggatggttgacaggcgccaaggatgttctcgagaaggtcatcgatgccaacatggcggatggggtcaatcccggcagctataagtaccgggtcaatttgtccatggagacgggcgatgaacgatacacattcttgaacactttgatgtggatcggcagcggttgccgcaggggtcaggaaggtaggcttcttcaatgctttcttttgcgattgtcccatactaactagtcatgcagtcatcttcgactcgttccgtgtcaactaggtcaatgcccttgtcaaccaatgatgtcctttccgttattcagcgatttcgtctttttttcaacttcaactttgtgatgggaaaacggtgtttctactttgccatttcttgacacacggcgcaacgtttctatgattcgatccttctcaccacgactttcttcttccgactctctttgtttgatttcgaaccaagggtatatccgccaccctggtttgcacatgccccgcaattaagctgatcttgagctctgccttgtctttgctcttcattccatgtgttttttgcggttcttcttctggtgtaattcttttatggctatctctatcaacatagtcagccttgtaaggtattgctagcttttttttgatctcggcttttcatgtcccatctccaacatccagatttcatatgcaatattccatgtagtcattctcaataggattgaatgttgttccggatctgattgatctctgtttcatgataatttcatgataccttacaaaaaggcaggtaactctagccctggacatcgtacgcttacatgaatggtgatatcactgttactatgcaatctctcaaagcaaagattcgactttagggagatgaagatatctgaatttggaatgtatcttgtttttggaataatatagaacgaaatatataacccgcttgtcatgtaccgcaagaccgtactcaaaccacggtatatacctgtacgtaccaggaacataacgaataccttttcagagaactttgctgtatatcgtattattatttagaatcgagcaattaatttgattttgtaattcatggaagcgtatataaatacaaggataggtattatacactatatcaatctctagcatactcatctccagtgaacccgaactggttgaaaaccaaatcatctgcccacgtaatagcaaacggattcctgaccaggtcagacagcggacttcctagcctcggtgaaagcgatatctgaattgcattgcgctcattggaaagcccttgagaaagactcatgaatttgagggagagtgggaatcgcacaaggggtgactagttagctgattccagtcagcggtagcttttatgggctgaaatcgccgatgtcggatgtcgcaaagagaggtatgccgtcgctgggtatagccgaatcgctcggatgtgcatatagagaaggaaacatatgcctattggtattgggtactttagttcctaatgttgacctcggtttgcttcacatagatccaagcgctaaaagttcctagcgtgccggtagctctctgttgagcgggtcggccgggaccggattggaggaggcataggattctggtcatggctgattgatcttatacgaaaaagatgagcttgttagtattattgaatattgttttcggggtaactctcgacacatggtatttaacaacgacaaaatgaaaaagagaaaataatatcatggacaacctagagtttccatgccaatgacctatcctactactagacacacgcctccccaatcccgagccctttcatctacggtttcaagcctgggttcagtgcctggaaatgcagcacaagactccggtcttcactaggaagtacagtgccccgaagaatcggaagattgagagaccagaagtggccaacagaataatcttgaaataccatgccgtgcgagttgtagacgtcgactatgtcagttagcgggtgtaaacagcagacgaaggaactcgagcttcacttaccgttagacaaagcctgtcgatgctgaggttgttaatacacagcgccagaagaccattactgaatgtccatagcaacaccagattcgttcggaatgctttgtatgaatcgtcgagggccaccccttcgttctcagttggttcttgccagggagtcaaggcccgcttcacagttgacgcgaattgttcatcaatgtcgacttgaggcttgtcaagttcctcgacaaaaggcgtttcatcatcctttttggtttgcgctgagggcagtttttcgggtgcatctgatccctttgtcccccatgaaacatcatgccaattgcaaaatgcatagaccatcagaacattgatcgaagaaggcattccaaggaaatatgcccaggaggaagtgagcatatgccaggggtcggcgtagagtatacttgcaatgaagtaaatcccgtatgttgataccaaggcaatcaaaacaagcccacccgttgagttgaaaaagcccgatatgagtgccgaaaacccatggctgaaatcaaaattgagattctcgggagtcattgcctgcgcaacgagatagaacgacaaaatgaggagatagagctggaccacagagaagtagacaaaggagagcgtgtacagaaactttgatctgtgattggatattagcggagcgaaagatagtaccctatccccaggccctaatacttacccctttggtcgatttccgagagctagaatgaattgaagcataagaaatgtcagataaccgatcttcaacagattattgacaatcggggtagcatcattcccaaaaggccaccctttgaatttgttggtcgcacttggtgtccccacaatatccaaaatgacggaactagtgagccagtaggatgctatactatgttagtgatctggtgtaggattgatttgaaccccaaagagtaccgtcaacttaccgagtgaaagccatgtcatgactaactggcagatattgtaaatcaattggatatgaagcagtagcaaccgaatgataccatgcccactcttatatatccgattgaaatgcatgactgaatataacgatgctgcaaaagagccattcagccatcgtcgccgttgacttaggaactctgctggtcgttctgggacgtctgtttcccctttcgatgctttcacgtatgtaagtagccactggttgccagccttagcaactaattcgaagcaaaggatacgatcctctgcaagaaacatattcttcttaaagatattcattccgtcgatccctttcttaccgagcttctgagctagtgtgtgatccccatgaaaatactgctcaagaggcctgcccataatagcgcgataccgataggcagagaaagcccccggaagtacgctgacgtagccaaaactgctctctaagggcttgtccaggatattggagattttgtattcaaaattttgagctgcaaccaagggattgaggagcttcttccatcggtggccaagaagcgcgtgaatttcaccgcaggccccaccaatatttttatcgttgtagaaagcctgccatagggctagcaaagacttaggcccgggttttgtgcccgcgtcaatcaagatgcatatctccggattcaaaatgcgcccaaatgcgttgaatagccaccgatgtgagttgatcttcttcgcattctttttcttaaggcaaaacatcatttgtaccgggggaagattcatagggtcgtctttgtatggacgcacaagctcttgcttcggcgtaaccgacaactgtgtggtatattcaaactaagaaccattagcatctaaacatttcccttactgaaatccacaagggttggaaggcggggaaacaaacaacatgagcgatcgtttctcttccgtccacatcttgcttcatcacgccatcttgaaaaacgccaatagtcgccaggacgtcaagtgtgtttttatcgcagggatccatgccatcgaagacaagacagacgacaatcttctgccatgcgggaccaccccgatcccaaaattctgtctttttcaatttcacgatgtctcggacattttgcattaccccatgcagggttcgggcggtcaggactttatcttcgttgtagtatgtgacggcaatgagaagttcagtgtgccgattatacatcgaagggcggagattgtaaccattgcgtagcgtaaattcatcaggatcacacgtcgcggcagtgtctaaagaaaatagaataagtcagcttatcatgatatgttcgagtcaactggaacattggtgggaatactcacatctcatttgtgtgaattcttcagaaagttccccctccgcatctcgatactctggctggatagcattgcgtataggactcggtaccggatagttgatactcaagaccgagccttgtgtcaacttgatccgccgtgttggatatcgacggatgctacttcccttgtgtcgtcccgactccttggaagaggacacagcggacccctggtgagaaaggttgtgtaatctgatctgatcaggaaggtcgagtgattccatcgaccctggcctagggctttgaacctcagcagatgaagagttatacggtcgacgagtgccttcgctccaagagattgggtctgtagagggactgagagacagggcagaagaatgggccggatgaagtagggagagggcgtgctcatttgggactctagtgttctggcaaggatgggaaatgtcagttcggcttgccgcatgttcggagatcaagcaatttccacttcatatacacttacctggggcgaataaccatcacttaggccgtcactctcattagtttgccgtacatagtgcgatgaataaggccgatcaaaataattcatcatgtaccaatatgaattcagtactgggggagtgtgtaagctgaaagttcgagatgcaatccctgaaattttttgatgccaagccggttcgaattgattaaggtatgacaggctgtagaaaaatgccgaggaatttgcaggggatatcaatcaagctgaaaataattgaagagccttcccctttccttcccaacatggaagaataacgagctagggcactctaccttggcccaagagaaattaagtataagaggctaatttaagcccgggaccccacatctctgctcgatgagttggccaataatatggcaggtcctcttttttagcgtgaggcttaaacacccttattatcctcaaccagccaatggacaaacccatattataggcactttagttacctgagtacatcatcttggtaaaatttcacttaattaaccgactagatattactcggattttgtgaaatcccacgaggcacaaaattccgattgcgccgagatctgggatcactttgaagtaagacacgcagtgaagtttcatgtattttaagagtgtttttaaaagggttagacccttctaaggataagtacgagagctggttccaaaataacacttcccctcccaaattttctctatgttgttcaaaatgagctcacacttggcctctcccgatcagcgatggaatcagagttaagactggacgagacacagccagacaaagtatcgggcgaagtaattgcacaccaggttaccggctgacttgccaacacattgtcctaaacttgtcggggacagcaacgtcgcggctgactcaaagcaaacgcacggaaactcataacgtatgtattgattgttgtcattaacacgtaaacttcagcttttccaaaagtctcaccgcctctttccttcagactatttgatgtatactagttcaaacagctctggtgtaactataggaagcggggataatattctccgattctctatcacagtcagcattaatcaaaatcgaaactatgtgactgaatattttcaatatttctcagattctacaggtgattgaatgtgttctcaaatggctgtctgaggctgattaaaaagggttgtattagccatgatcaagataaataagaagggctaaaatttctgcattcaccttggatcctctaacgagaattgcgagccttattttaagctcataacttctaacattgcagacttcgaagctcgaagtctcagggggcagccagtcattggaccatatggcatcccccaaactgaccgttgagtccgaaggagcatctttgagacctatcttagacgggaacgtttatctcttgatccaatgatctagggaaactcctatcaagttaagtctcatatcatcggaagaagatatgagccgtacttagggtacatgacgcatccgcagtctcccgtcgagtccctgtttgatctgcagggaaagcccattatctgagttgtgtttcccgagtttgaataatccatgtcatatataccacttacccactttttgatgcgttccaacagcagagcacaggccttaacaataaccgctgagaattacgtagtgggaaggggaaatgtaaagtacgatagggacgagcaggtagagtgtttatccatgttattctttgctaacctacgatgtttgggttcgtactgagaagcccgagtatcctacttcgtacctcgcacggcattcgaggtgttatctatccccctgcagaaatcctcgctctttcattgttttgtctcacaatatagagctttcagtgaagaaaaagcaagtccaaactatttatagacctaagtacccgacccttgtggactaaattaaaagattactcagtcaaattgtccgcgctatccaaatggtacggatggtagggtaatatcatagccacaaacgcagtcgtttagagatgctgtctcacaaagtcagaagaatagttctggcaagagtatcacaccttcgcaggatcacgaattcagtaacttgaaaaaagcaaatctgaactcagccatgagtagtacaacttgggccgattttcaataaggatcacacaatctaggttgatagccagcccctttctagtggctgtttgttagtccactggtttcattacttgcagatagacaagagaattctcaagacgccgatgaatacgaccctaaagaaatataaatattatcaccctgctgaccttgagttagactcctctagtaccatttcacatttgacattcccataatcgagacatagttcgtccaatttcaatatgcgtctcaccttcattgtatttatggccattatcggcgctgctttggctgcagacaaggcccctcctacggtaagttctaacaaatgaacgtcagataccattaaagcctctaaacattctttagattcagaacggatccccttgcaaggccgatggcagcgcaggaatctgtgccagtggcttctgtttggtaggtttcttgccttgctgaaaatgttgtgacatcaaatattaatatgtcatacagcaacttgctcacgacaatgagggagtatgcaagtagactacggatctcactattggttttaattgattgacgatgcggcatttccgctcaaaggaaagccttcaggggatacagtatggactactcatatgggtgggttgcttaagtagtcgatgtttttagctgaatatgattgactgctctcggatttggagaaagaatagcttccctcagctcaaggctccagttaatcgcggctctcaactcagaacccgtacaaggctgtgaaacagaatggtatttggttcacctgaatcgaccaaagtcactggagggccagctgtgacgttctacggataggttgcataataaataaaaaaggaagttgtgacatttgcacctcatatgggctctgttttcggatgtaattcaatatcaaatagtcgctagtacaaatgaacagttgccaatatataaattttgaatcagagttagaaacctaaggttcgttgttagcaatttgattgtttctgaaattggtgcacgagaacctacccttttccgtgttaccatcacccatgctcttgctgctgctgcttccgctctggatagcgcccaatattccatcaatgtaaggcgcgccactccacttctggtgggtgagaacgtcgacaccgagctccttttcgcgggcctggacaagacggacataagccaacataccctcatccttgaatgcacgggaaagttcggtcgtgatggtggcattactatgcagaccagccaaggaaatgagctgcaggacaaatctgagaaaggttagtggatcgaagcgaaatagttgcaatgttgagcttacccttgcttggcaatatcccagacaaaggatttgagggaggcctcatcaaatccttgccccatccagttaaatgaagggctgaggttgtacacaagcttcttgcctgggtacgccgcccgcacttcgccggctagctttccggctttctcaacatctgggtcaccggtttcgacccagagaaggtctgcatacggagcaaactccttcgcgcgcttggtcgcggcagggaaccctgcggcgtagtggtagaatccctcacgagtgcgcgggctatcacatgaccacacaacaggccttttggtgtaatcgttcgccagggcacggcgacgggagaaggaaagatcggggttcttcttaacaaaggccttgtacgcatcgcgagatgactggggggcgccctccgactcaagatgagcatcgacagctacatattattagtgaatgggatcgcttgacacagaatcaatagacataccttcgtcgaatgtaacaagcttatggctcttgacccagccaagttcgaatgcgtcgatttctttgggtgggacgccctctcgttccatagcttggagggtctcggccagaggttccacctcctccgtaataccaaggatgaattcatgatcacgcacatcgatggcgctgctgatgagtcggccgctctcggaatctgttcgagcaatgaccaggttctcacatcccatcatatcccactggaaccgagctgcgaccagtcggttgatgtgttcacccactgggacgagcactttgcctgcaagatggccgcacttctttccgccgtgcaattggtcctcaaagtgaacggctgcggcgccattctctgcaaatagcttggcgagtttgagaacagccgataagccaccatggctgcaccgagatagttagtaatacttcgtgcgttcaatcccaagtattaacgtacccggtgtcaccatccgcaacgattggccggaaataatcagtgtaaggtgtggcctttcgctcttctggggtcatctttcgcctcgcgtcccactgttttcggtcgtgcatggactgagccttgaacagacgctggacctggttggggacggtattatagggataatcgccgaaatccggtgatacttcattggtacttgtcaaaagtgaagagcaagcccagcctgagatgtatagaacctcttggttgggggcttgctgcgtcatttggacggggtcaatagctcccacttgtgtacggaaacgagatcagatttgccacaattggagctcggccggtcaaggactcactggtatgaacgggctgaccggcagctgctcgttcgttgagaagattaaacagcttccgcgccatcaaagaactgggatatgtttgttgcaaggagccgcgtttgctcacaacatctgccgccgtgtaagggcgcttgatgccttcataacgaggcgaattccaccatgattccacatcacgaagctgttggtcgtaaagggcatcttccgctgcacctgctttttcttgtgtggacagcagctggtattcgtctgtggggaggacggtggatacggggggctgcacaggcgtcatccgagtataaccgcttgtgaaaggtcgcaatgaacgcgcagaaatagtagacacaacaggaacacgtcgaggcagacgtcttaccgaacggaacatgactgacagtaataatggaagaacaaaataatggttgaattgaaacagggacgaaccgaaagaaaaggaactaagaagcaaataagggctcctctttgacctcgggccgtgaacatctggggtttccccgccacttgactccgaaggtccgaaattcgctacatgactaagcgtacggtcaatggatgttaactaccgggacctcgggcctcgaccaacaacattggagactacgacactgcttcgtacatagtattcgtttatgtgcagtctttttgccttgctcgtttttcagtgccaacagtctttttacagctgaatatcccatgattgtcggtcagcggtcaggacagtatgctctcaaaatgtacgacctcattggaatggtccttattgtcatatatgacgactggcacctttttaggttgacattgtctatgagtaaaggatcttctcatcgagggctctgaggctcccaagtctgtgtggtaacgaatgttggaattcttgtgttttacgagccgtggtaaccttgcaagtgcctcttggttaggtatggcctctagttttaccacctgacttcgaggcattcttactgcattcgcctgtagtctgaccttaacatctatcaatatcaactggcatcactttcactttggcctcacattgtcttcacttcaatccttcttttatgtaggcgtgttggacctatcattcaaaagttgattatgaatactacaatatactactaattgcagccaggatgtcgaacaattctaaaaatgtcaattttatactcacaataatcaaatcagaagattcagatcacaaggttagctatgggatatagcaggcactggcgggtgaaatgattgaacaatgccattcaaaggctctattgaagcacatggctatccaagtctattgttcaacaaccgatctattgagcggattccttggggcataactcaatacacattatgctcgatggagacattcagcttggagaaaaaatagttgagctttattcatgtcgactatcaatgggctcagtactgcttagccgtatataaacctccaaaatcctctcatctagtcctttcttttccctcttcaaatctcaccaatcttctgcctcgctctcccttcttttcttcttttcttttttcttttttcttttttgtttttttttttttctttttttcgaaaatggtgctggacaccatgcctccgttctcgaagagcggcctccagggannnnnnnnnnnnnnnnnnnnnnnnnnnnnnnnnnnnnnnnnnnnnnnnnnnnnnnnnnnnnnnnnnnnnnnnnnnnnnnnnnnnnnnnnnnnnnnnnnnnnnnnnnnnnnnnnnnnnnnnnnnnnnnnnnnnnnnnnnnnnnnnnnnnnnnnnnnnnnnnnnnnnnnnnnnnnnnnnnnnnnnnnnnnnnnnnnnnnnnnnnnnnnnnnnnnnnnnnnnnnnnnnnnnnnnnnnnnnnnnnnnnnnnnnnnnnnnnnnnnnnnnnnnnnnnnnnnnnnnnnnnnnnnnnnnnnnnnnnnnnnnnnnnnnnnnnnnnnnnnnnnnnnnnnnnnnnnnnnnnnnnnnnnnnnnnnnnnnnnnnnnnnnnnnnnnnnnnnnnnnnnnnnnnnnnnnnnnnnnnnnnnnnnnnnnnnnnnnnnnnnnnnnnnnnnnnnnnnnnnnnnnnnnnnnnnnnnnnnnnnnnnnnnnnnnnnnnnnnnnnnnnnnnnnnnnnnnnnnnnnnnnnnnnnnnnnnnnnnnnnnnnnnnnnnnnnnnnnnnnnnnnnnnnnnnnnnnnnnnnnnnnnnnnnnnnnnnnnnnnnnnnnnnnnnnnnnnnnnnnnnnnnnnnnnnnnnnnnnnnnnnnnnnnnnnnnnnnnnnnnnnnnnnnnnnnnnnnnnnnnnnnnnnnnnnnnnnnnnnnnnnnnnnnnnnnnnnnnnnnnnnnnnnnnnnnnnnnnnnnnnnnncccctccccccccgccggccagctgcagttcgcagctggcaacgaaaatgacatccttgaccgaatgggggatgtcgagtatcccccttcgcctgttcgggaggatctggagggtgtgctgcccatggagggcgttgattttgtgccggtctccggtgtctacattgacaccatggtccgggatgtctccccggacatggatgtttgcgcagagtctggggccgtgtctgccttcgccccccctgctctgactgtgccttcctccgtccctccggtggtgccctccctccccgtggccgcccccgccaccaacaagtaccggcaacggtactagttgcgtttgagaagactgtgtgtgtgtctgtgccctgattttctggggcgttagctaccgtttgttttgtatatatatattctcttaatgaaagatatttctcttcacttttgttttctctacaggatattttttgtcgtagccgataatatccgtagtcctaatggtgttggagaaatgatccccgcacgatgttgttaggtattgtttatagtgattgatatccacatccacatagatatatccacagatacccgtggactcgggttggaaggacacacgagctccttcaactcggcacagcgtagaatccaatcagacatccgcgatggccgagccggttgagattgaaatggaaaacgcatctgggattctccaagatcggcgcccccgcatggcttatcatctcctctccgtgggattccctatcttccacttaccattcgctgtcagcgcctcttatctttctgtcttcatctccctagttatttgtgtatatctcgttttcttccgtttgaatgggttcaacatcgacttggtatggaaagcattaaattcccaccgattttagacccgcccgacaacccggcatcagcgcggggaaatcttgggccacaaaagccaaaacagacaaagagtcggaatggtaagtaagaatacagtgagcctacgtcttcctgttaacgaggcaagaacaacgaagaatgttacttcatcacattgtttacaagattgactcgagtctccacttttataggttgcatcacctgcaaggcaaagcggttgaagtgcgacgaagtcaagccatcttgtcaccagtgcgaaagacgaaaggtccaatgtggaggatacaagaaagacttcaaatggcgaccgttcgaagagatcaacatggcctctgggcggcctaccgtacccaaagccaaaaagggtaagtcacgggtcgtgtgagttagcctggtatactcacgaatccttttagcgaactcttcatcccatcaagcttcctctgccgccaatattggccagtcctttccgactcctccgacgactgaacaatcggcatcgccgattcgcatacagtcccacaaatttggtggctctcgttcgcctccaggctctcctttgcatagctcgccccttagtataaatagctttctttccacggaagcccgttctcttgaagatctacccgtcacacgggaagatgcttccatggtagagtgcaatgaacctccccttgatatcaatgtttcattgtccgccgactctccccctttcaattttctctccttcttggatccttttcaggattctctgtcgcttgcaaaccccttgggctctgatgtcgataccgatactgctagacatttgccgttggttccagacaagccagataccgatgcatctaggctgagcttctctcagctattggaggatgaaaacgatgacattgaggagatcatccggaaatcggatccagcattgggaccttggaatttcgccctaaccgagggagactctttccatattgaccccccaagcatgtcagacaacccatctctacccccggaaagtccggaaatgctcgtgatgcggtttgataaactcacatgtgggattttatctatcaaagatggttcattagagaatccgtggcgaacactcatttggccgttagcaaaagacgcgcctgcacttcgccatgctatctttgctctgacagcgttccattcggtaaagcaaagcccgcaccttcggatccaaggagccaaacatatgcgccagagcataaatggtctagtcggacaaattcagaatatgagggcggatactgcgctggcgactagtttggctttggcatttgccgatacctgggaccaaaacacccgcacatgtattcaacatctgcgaggcgcaaaaacattgatgtgtcaggtgatcgcggccgggatgcaacgaggtgttagtgatgaggagctggatcgcatccggttcctctataacacatggtcctatatggatgtgatcgcacgactgacttctttggatgaatgtggtcctcaaaactgggattcttcggttttcgagcttccaagtgatacagtccatgatattgatccgttgatgggttgtgcaacgactctataccctcttataagccgggtcgcgaaactgatccagcatgtgcggaagagcacgtcgaacacggtgtcggttgtggcccaagctatggaactcaaagctctcgtcgagcaatgggagccaccgcaatggtttgagccaccagatgaccccaactccgaggttcagcatagtattcaagttgcacatgcctatcgctgggcgacgttgctatacctacatcaggccgttccagagataccctccgagccggccgatgaattagcaaagagggtcctgatcttgcttgccactgttccctacacttccaggactactatcatacaaatgttccctctactagcagctgggtctgaggttgacactgaagatgaccgaaaatgggtcttggatcgatggaccacaattcagtctcgattgatgctaggtggtgttgatcgctgtttggaggtgttgaaggaagtctgggaacgtcgcgacgcaatgaatgctagaagagcgcgtgaaatggccagttcgcgacgtggcgagtctttctcatctggagatagggagaaaatgagctcgtcattgccagccgatttccgcaaatacagtctcaatggttcccacaaggggccaactggaaggccaggacaacctacatcgaggtctgcgcgacggggttccgcactcgccccgcttgaaaacattgaatttgaaagaactgtgcgtggcagattgcattgggtgaatgttatggctgaatggggatgggaaggtgggtttgacaactttcaaactatttcctccaaaagctaactctgcaactcatagttttccttggctagcctaccagcaatgaatggcccaaaccttggttgaaattgggtgccatgcgaaaagaatatactgttctttgcattctagcctgctgcactaatatgacagctaacaaagcaagcaagtctgagttcttgtttcctgatttttgttatcatgtcctcattcctgtgtctctactttatttgtcctaaggttgaaattgtacctgacttggtgttgccttgaaccagcgcggcgtctagggagtctgttgttctcttgttgatgagttacgacaacgatgttttttttcgattgagacttgttttctacaactgtggtcgtcgctctgacaacgaattatggttgatctaggaactaatatgtccaacatgatggtggtttatttgacttccacgctttcattcagcttttcaatacgcgatacccattccggaagcccctaagcgactacccagtttttggcctattgatataattccccaatgctgattctctatcgaattttcagtaatacggaaaccatgatcagccctatcagagtcaggctcatcatcttctttgccatatgcacccgatacatcagctcgcttggccattattaccgccctataccggaatacctacctaccaacactgatcatccgacgaaagcagtaacccacatttgccttcgtaggcgcgacccagcaaggcctggtctgatattgtcccaactgcgaaaatgtaaattccaggaagctatattttcagagagactattctctgattcttacaacaatctacacgatacccaagtctctggcttcccttacgcgctgaggaactatgttcttagccagattcttgggtggccctgatacagtacgtcctggtcccgatcaaattatgaagttctgggagttcacaatctatcaggatttgctcattacatcgtgacatctttagagttccttaaatcaaattgaaaggaacgacgatcaatatccagatgcatttggttgttgacgagtgcccctaggcctagaggcgattattccccaggagataccgctcaccaattgctgatttgtaagttgagagttttagaatttcacatccatctaatttgcaataggtgcgtgaaatccggatcccctcaataagggaatacaaactgctcagcttttgcgccaagaataggtacgaaatcttcaccctcacaaatcttcatggccttttgataagcaggccgatcaccaacacgcttgagataagctagaatgttcttatgcttctccccatcaaactcaatcggacaaaatcctctcatggtagtgagagtacagattgccatgatatccgcggcggtgacgtcattcccaacgaggtaggatccggtttcgccgagtctcgcctcaaccattgagagcgcacgctctagtttcgcattgcccatcttgacgtgcactgattccgggtcgctggtcaagcgccgggttatcaggacacggaataaggttggctgtagggaggcattcgcccagtggtaccactccaggaaatggatgtattcgtcgccgtctttcggtgtgcgcgcgagacggccctctccgtaggcggcgataatgtaatcaatgatagcgccagattcagcgagcacgaccttgttttttgtgaagggagagctgtcgtcttcgatcaccggcgcagtgccggcaggatgcaggtctttgattgattgcggggagaatatagggtcgcgcttgtggaaaacgaagtcataatcgatgccaagttcttcggcaagccagacgatgcgctctgattgcgagcggccaaggtggtggattgtcaatggcatcttggtttgggattgagaaatgatgaaggggtgttgggctgttggcgatgtgggatgggaattgtgtcgagaaaccaagtagtgatactctgtaggatcgtcggcatcgtgataggggccgtctccgcttgaccttcaccgagattcgtcaaattcgtacccctagatctcgacttggacagctccattacttgagttatgcggcaatcggatttcgtcaactcgcggtttacatatatgatcttagtgaaatggcaatgaggttaactatgagtgtctagacccactcagccattaaccaatacatgttgatatttaagcgcttcgtctgtctaaatatgcataagacttaaagcgaatacggaaactagcggagaaaaagtaccattaaagctgattctctgaagatgcgtcaaagcgggggatgcatgaagtacaggggtagcgttctcgttttgccgcgtccacatcacctctgtggtttgatcctgtatctacccacttacctgaatagctaccctcgaaaataatcacccgaagcagcattgcacagatcactcgtgtccgtcgatttgacatgatcaacccccaagacagattttggtccgacgcccaagcctactgcggcagggtcgaagaccctnnnnnnnnnnnnnnnnnnnnnnnnnnnnnnnnnnnnnnnnnnnnnnnnnnnnnnnnnnnnnnnnnnnnnnnnnnnnnnnnnnnnnnnnnnnnnnnnnnnnnnnnnnnnnnnnnnnnnnnnnnnnnnnnnnnnnnnnnnnnnnnnnnnnnnnnnnnnnnnnnnnnnnnnnnnnnnnnnnnnnnnnnnnnnnnnnnnnnnnnnnnnnnnnnnnnnnnnnnnnnnnnnnnnnnnnnnnnnnnnnnnnnnnnnnnnagggtcgaagaccctgccaccaaaacttattgcaatgtctgggattgggaccaactacggatgatcaaggtcaaaggcaccgccaagctgtttccgcccgatgggaatattgagcccttaattttggcaccattagcggattatctatcgccggaagttcgcgcaatcacagtcgacgatgatgggctactcactgaggtatcgatggatccaggggaggacgacaccatgtttattgcttatcctcgcctctcactctgtggatcgcttgcaggttgccgtacaattcagtactctaaactctgagagctcgatcggcttgggccatttgttggtctctcattgtacgaagacgagtcagggactcaaaaggtcgctttcaagtttgacgtcttatataaggctctatgactacaaatggcctgggatgaagttaatattctcaaaagtctaccaccacatcctaatatggtaccatttgatcgcgttgtcctcgatgaatctcgggtgattagtttcacaacaaagtacatcccaggtggaactctcgccaatccaaagatcccttttcgatttgagtggctacaacagcttactcaactggtggatttcctcaaccttgaatatggaatcatgcatcaagatattgcaccccggaatctacttgtcgacctttatacacataagatccttcttttcgatttcgattgggctgcatgtggagagaaaaacctacaagacggtcgtgatgacgttagtagcgttgtgctcacactctacgagcttatcacgaatgatacgtccttctcggatatcctccactgggaacgaaatatggacatagtgtcaaatactcgatattggaaagcagtgtgtggagaattgttatgtaaaattgcttgaaattgttatagtacacctatcccctgcacagtcgaccaatattttcccatttctcaagttcgactatcctctgtgtgtccgtattccttttatgccaagcattaaaagacactgatgggaagggctaaccgcatgaagtaaaagaatccctactcaactacacaatcttatcactggaggtaggctcacctaggcataactagtagtagtagacgatgagacatcaataccgtcgaaactcgggaattttctcttgattgataacggcctcccctaccattctcagatctttatctcaagcttgtacttcccctcatcactagcaagcccctcaacctctccgtgattttcccaacccattctccgttgggctgcctagtcaggatatcagatccgactatcgctattcgtctggattgagttaccctaagtttgggggagttttctttctagatgacatcccctcatttcgtacatggcagagcgcggcaacatcagtataaagcagaggtaatcctcgagaatggattggaatatcgatttatttctatactagattcctcatagtcagactgattcctcaaaccatggcagttccatttacctaccacgctaaggcgcaatccaccttcaagccgccacttattgccaatgacaacgccttcttgggtgatgtgcagtcaaggtatggcgatacttgtatagataatgtttcaagtaagcaattttgttgacatactacagcgagaaggaaaacccagacaagcccatgtcatgcggcttttaccgactggaaaagggtacccccctcgtctacacctacacctacgacgaaatgaagattatcgtcgagggcaaatttgagattgccgacgagacgggccagaaggttacggcgactccgggcgatgtgttttatttccccaagggggcgacaatcacctttacaacggatgactatggactggcgttctatgtgggtacccagctgaaatccgaatcatattccaacggacccaactaacgaaaccagactggccaaaggaagcagggcgctgcttgaggatataaggattaataagattaataagaattttaaactttttattttttaatttctcattttagaagtttccggttccgtggttgggcttgccaattatcggggtccccgtgcctccaatccatggaacactcggctgtgttgggctagttatttcccaatccggtagtttgcttatatatcccttgcaatagcttcatgattccggtggctgcacccgactaaggcctaccatagactacctacatgtacatatacatatgtatcgcccggacaattattgcttattcccccgaacacggggatgtgcgacattcgctagtctggattatgcaaaagtcaaaacccaaagtgcccacttcagtggcggtttcatgttgggaccccatagagtcaatctcacttgagaggagccgtcaaagcacaagtagcgattggaagtggagatgattttcagctcgcttcgataaactcatccactcggctggggtttagggggggtttaggcgggtttttcatcagtgtgcatgacgtggggggagttgctacagcaactccgtgaggaagggggggatagagtcgattgtagaattgagaatcaagatcttctgagatcttggtggagagggatcgacttggaaataacaaacataaaccttccaatatttccgagggacaaaggcattttcctcctttccttttctcttcccctaaccatcttcgtgactttgcctttgttctggcgtgttagtgcccattagttccggccttatcacaggggtcatcaccaacccctctatcgcttcgacatcaacaccatggctattattccagacgaccatcttggtctccgactccctaatccaccacccttgttgcatactcgtgggcaattcgatcgccccgctactcctgccgatggctttaccagtccaccacagactccccagggtagccccagcaagtcaaggttgcctccgggcgcactcgacctacccaatgtcttcgacaaggcgatgaagttgaatcccaccaccccctccaaatcgacatacaaccactacaatcatccaatgttctctgctggcaagagtggcgaggacttcagcgagagcgttatccaccaaaccccttcgagcccaacgcgtagagccaacaaggagaacacaccccccaacccaacacgtctaaaggacctgggatcgaccccaactgctgcagctctttcgcgccaagaaccataccaaccacgcgatgatacgaccagacgccaggtgcagatgcgcggcctgacccccgaggaaatggagaagctagcacagcccaaagtgaagcgcctcgtcaatgtgacccaactctgtaagtgcggcccgacctgataattttaagacagattgactgattcgtgcatgacagacttccttgaccattacttcgatctccttagctacgtccacaatcgccaaacccgccacacacaattcaaagccgcttaccccgaaccccctgctacccctgacgaagagtacgaacccgccctcctaaaatacctcggccgtgagcgcgcacatctgcggaagcgtcgcacacgtctccgccagggcgacttccagattctgactcaggttggccagggtggatatggacaggtgtatctggcacaaaagaaggatacgcgcgaagtgtgcgcgttgaaagtcatgagcaagaagctgcttttcaagctggatgagattcgtcacatcctaaccgaacgcgatattctcactgcggccaagagcgagtggctagtcaagctactctatgccttccaggatgatacgcaaatctacttggccatggagtatgttcctggtggagacttccgcacgctgctgaataacactggcgttcttcataatcgacacgcccgtttctacattgctgaaatgttcagctgcattgatgcgctccatgtgctaggatacattcaccgtgatttgaaacctgaaaatttcctgatcgactctaccggccatgtcaagttgaccgatttcggtctggcagctggtatgctgagcccgggcaaaatcgagtcaatgcgtgtgaagcttgaggaagtcgggaacacccccgttcccttcggtcgacccatggaacaacgtacaatggccgaacgacgacaaggataccagtctctgcgccagcgggaagtcaactacgccaagtcgattgtcggatcgccggattacatggcgccggaagttctcaagggcgatcaatacgatttcactgtggactactggagcttgggatgtatgctgtttgaggcattggcaggctacccgcctttcgcaggcgcgacagtcgaggagacatggcagaacctaaagcgctggcagaaggtattgcggaagcccgtctacgaggacccaaactacttcctgtcacggcggacgtgggatctcatcacgaagctagttgctgggaaggagcagcgcttcaagaatatcaaggagattcacgcgcatgactatttcgccgaggtcgacttcgagggtctgcgtgagcaacgagctccattcgtgcccgaacttgattcggagactgatgctgggtactttgatgatttcagcaatgaggcggatatggccaagtacaaggaggtccatgataagcagcgggcgctggaggatatggccgatcgcgatgataagatgagcaagggcttgtttgtcgggtttactttccggtatgttatgctcaaatccatgtcgttctcttactgaccactatagtcatcgcaaacctgccgtcgacagcaacggccgcagcagctcgccgcggaagcctatcgcgacggatggcacattcggcacaatgttctaggttcctggacaaaatgcagacttcacattcatattcggtcaatccttttctcttcttgcgttccactggcgcgtgcgggactccgagctggatcttggtttccttgtgccagatgtcccagtattgagtttaatggctcatattttctcttctttttgttttaacttcagcctcattttcgacttgcaacctgcaacgtgacacttcttctcgactcgttctgattttatggtgcgcgtggagttgtggaattcgattcttgtatgatacagccatagatcgaaaatggcgcagttcctgccttctgctagtaatggtttcattgtatggaatatggaatatgagattgatctcgatcgcgatcctgtgccgagcagactatatgtagcgcatatatcttaccgcagtacggagtaaagtatcgactcttttagtttacaggaagctggcgcaccatgcgtaggatctcggacttgtcgtctccaatgacagcacgaccattgacccagtcaacggtctatagagtatagtattagcacaacatatccagaaagatctccgatgtaacaatgggagtaaggaaaaggtcgaacatacaataggcctcacgaaattctcattatcctccttgaacttcttcaatgcgtcctccgcatcgcgggcgcccttcaccagctccgcaacaccatacgtcaccttctcgccgggattgccaacaccgctgacgggcgagatgtagtcgaggatgctgcgaagctggtctgttgtcgggggcgaggtggtaacctccagctcgaactcgccgcgctgttgctttgagtggttggtgtggtcgctagcttggtcttctgtggcggtttcaccagcggttgcggaagcttgtttcaggatgttgagggttctagtcgatgcttggatggagggggagtggaagagggtgatggggtcgagggttttgctctgtttgtgagttagatggtggtttggcagctaagggggggggtgaattggtgggtatggaggttcatataggcagacttacgaagcggaacatcttgacggtttgggtatttgcaatttggatgtgttttggtgatagaggtaggtagaatggagggaggtggaagaagtggagttggcttaagctgcagttcctggatgatgtcatgtgctggctcgggtcgtctcgggctaagctgcgctggtccgaacgcgtcaacttgatcttctctttctagtgtatattgtatgctacgaatactacgttgagaatttgagaaatgccatggggtatacagaatcattttctatgatcaggcttctaccgcctaacttggagcgatggcgtccctatgtcctatcaactctcaactccccattttgagaagggttttgaacatctctcaacatctaggactttatctaggcgacatagcctcttactgctcattgactgtccccatgcagtcgattggcctttttgtagtaggactgagcgatgtatccaatgcggttaggaacagaggctgttggggagggcgccaagtttcggggttgcgtggtattgtacctcactcgcctccagcgagtatcagattgtcacctttagtcattcctcttgttatgcctgcatatactcattagtgacacaccaaagtgccaatatgcaagaatatggacatacccaggaaatcataaaccaaagttctcaacatgcaagtagataccctgcgcgccagttcctttgtgcacagctcgttcatcgctcagagaaaccacgctgcggcggacatcgtctgctagaccacgaggtccgcacacaaccacggcactttctccttcggctttctcgaggaccttgcggatgatgattcgtggcatgggacgaccggagataatgttggaataaataatttctttgcttgcgacttcttcaggccgaagagacttcacatccagagcagccttctcagactgaacaggtgctgggccagagcaggtacaggcacaggcagtattgatatcctcgtcttcgatttgcgcagtgcaacagcaacctccaccagggagacacccgctacctgtggcaacgggagccgaggtcgatgtcgactcggcagagagagaattaatcgagacattgtccttctcggatatattcttgccttcatcctgggcaaaggtctccagcgtaggcggagacactgtctgtgatggtagtgagacagatataggcggatctagcttttcatcgcatgtaatataaatgctaatttcaatttccatttggaaatttgaacgtgtgcgtcgacactcactcacgtctgccagcaaagattgcagttcggaatcaaagtaagtcagctgagaacgtgatttgattacccagacaaagcgtaaccgcttggtagctgttaaacgagcaatacgggcaggcatctgctccttgctgccgttgctctccagcttccatgctgagacaatatcccgcagaagaggcaccgtgaatgtcgcacccatgccacccgccagcagtacaacactgtcgaactgccgcaagggccggatgcttccatatggcccttcgataaaaactgtcgaactggacattcccgccacttgtctattccccaatagactatcgctctttgaggcgtaccggaagaaacgtctagttcccccattctcggcacgaataaagaacttcatcctattatcttctggaatggatgcaatggtgaatgggtgacattgcaatggagcgacggagtggcaagtgaggaagacatgctgaccgggttgccacccgataccggggttttcgatagtaacacaagtgacatttccaggtagtggagtgaatgtagccgagtgttcccaaagagcattggccttattctttcggtggaaaatggccaagttcgcatatgcaccccaagtgtagcgagcaagccgatcgaagaccaaaagcccaattgggatccatacccagaccttgacttcattaggcgcatgcatccataccgcaacaataaagccaacaaaggtgattagatgctggatgacaaagaactcataactgagccgacggattggagcgaaggaagtgatcacaataaaggtcagaataacccaagcggcaaacccacgcttcgtcaacggatcgttatagagctggtacgtgatataattccagcgaccccaatcacggaaccagaatcccatatggatggtggtagtcaaccacagcgtccgggcaacccagcgatggtaccagttcaaactgacgtagctcattcctgccaagaacccaataatgttctgtctgcctgccagcagaaagatcagcggcaactggcaaatggcgatgaaaccagtgcggtagccaacatcttcccatttccatacgtccgtagtgtccagcttgtagaaacacaggaccatgactaccaccaggttggctaacatgatgagaacggggccaagtggcgggaaatggagggtcaatcctccgagtcgaaacggccgtggagtcgcatagctgacttcgcggactgttgctgtgacggtggcgtagagattgaagaacagagattttggtttggcgggcgtgagtgaagaatctcgcaagctgattattgtcagtcaagatcaccggatgtcaaggcacaacataccgatggctagcaataacgcgatccagcacgttcacaagggttgctgccccgattgcacttcccacgacagcccagtacatcttctgaagggtgaacagactgggaatgccatcgcccatggacattgagcccgcaggcatgtcacccattgccatggacatcttgtgctggatgtgtagaagaaggcatgagatggaagcccactaagcatcacccaggtgtcgaggtcaccaatgtcaccaataacagagcagattaccaatattatgctcatccatgctcacctcccgggtttgggtcgaggtggggtccgccatgtggacacccgtggcaccgttgggcccaatgcggcaatgtgtaacttcctgtttcgaaggttatttctcttcttcatcttctgttgattctcatactctctctccttcctcaatcatagaatcaatcagaagacatggatatgaccagctcgacctcacacagtatgagctcctcgacgagctctatgagcatgactatggtcttcaaaaattcgcacgacacgccgcttttctccaatgcatggactcctgcatcctccggtggctttgcaggcacatgtattttcttgattattctcgctatcatcgaccgatgcctcatcgctttcaaagtaaccatggagcgccactggctcgccgcacatctcaaccgacgatatgtcactgttgctggcaaaagcaccgaagctgccaacattgactccgacccggatgcgaaacttgcatcgcttatcaccgcgcagggcgttgaagagtcagtcaaagttgtgcacaacatcactcatgggccaattccctggcggttcagcgtcgatctaccgcgagcagtcctgttcctaggcattgtgggcgtatcctatctactgtaagttctagtatttactggtattagggcaaacgctaataccacgtccagcatgctagccgtcatgactatgaatatcggctatttctgttcggtgcttggaggcgctttcctcggggaattggcggtcgggcgctttattcaaactaatgagcatggccactgaagatcttacatttgactttgatacgttttgcgcatgtgggaattatttatgaacttgagcagcatctgtctggcgttggggataatatgatacggattgacttgactctaattgctctcatcataaatctctcttttcttttccccctcctcgctgtctccgcggtccagagctgcatgcaatcagatgactaaaccctgcgcgcgcaattgagctaatttactaaccggatccggactagcccgtcggtaatatccacttttggcgctagcgtaaggctttaatttactttggtctgagttaccaaaaacagcaggtacaggccgttgtatctgacatatgaccattgtcgagaaattgtaaggtgtctggaaatatgctaggtgaagatatatgattatccagtatagcgtggtatggaagcatcggggagtgaagttcaggctatgggagcctaaagaccactccataaaacaggatcccggtgtcggatgattccgaatcatgcagtctcaaaggggaaagggtcattattgccggtatatcggatccaacggggcttcataggtggaccctgtttttgtcaagtcccgctaactccctcaccttgtacatatatgcagaactcgtatagacctccggggttcaaagagctgagttttcccactttttctaggatatctactcctgtctgattcacttgctacacttattccagctcttctattttaatacgccaacatactcccaatgaagctctccctcctcaccttcacggccatcgtgccattggctgccgcacacttcaagctgatgtatccaacctctcgtggcttcgacgaggataccatgcccaattttccctgcggtggaatgagccagtcttccaatcgcaccaaactgccactgtctggtggctcattccccgtcgctcttcagatgcaccattcccagactgccgtcgaggtccttcttgctctgggcagtgatccgggagataacttcaacattgtcctctcgccaactttccaggtcaacggccttggtgaattctgtcttcctcgcgtcgagatcaatgagaagttgatcggccgtaacctcaccaatgggatgaacgctacccttcaggtgcagaccaacggtgacccaagtggtggtctctatgctgtatgttcacttccgaatttggcggtttattgcggtatactaatacaatacagtgcgccgatatccagttctcttccgatgtcacgtatcagacaccatctgcctgtagcaataacaccaatctcgctgccaccgccttccccgaggcttctgctgcacgtaatgccaacgagtctactgctgagggtcaggcacagagcggatcctcatcctcatccacttcgacttcgactgcctctacctccacttccacctccacctccaatggtgctgctgtaccgatgcaaaccgccgcttggggatttattggtgctgctctcgttggtggtcttgctgtgctgtaaaagctgattatttggttgcttctactttattgtctttggtctcggagtttagcggtgcataataaacaatgatgtcttctctcacacgagacgatcctgttgcgctcacacgactaatcacatcgcagaatgtgacatgcacccttttgtcacttgctgatactctagccatgtttcgcgtagaagattggggtagtctgaatattgcgttctcatcgttctgctgtcttctttccgacaggatgagccttacaattaaccctatgttgcatctgctgacctctgctgcttcaagacgaaaccggcggccgataacgtgacagggaattcccagtcacctatgccgacagcgcagcgaaattgaatgtcaaattctacgttacatatagagagtacatcaaggacattgacaatttgagatcaatgatctctgcaatcgctataccctgacgaacaggtctacccagaagatggtaatcccacgtgtcgtcctagtaattattcgcaaagtatttggatgagcaaactcatagtctcggtaaaatccagtattcctcatcgcccttgcatggcagtggaaggcagatagtatgaagtgtcacgtgtgcgggtagattgacatatcaggcaactaggaaaatggatcatctcaagacatgagcatccaacaaacggagagagttgctagcatagtccagggcatagtccatgatggagaaccttgagatactgcgtccagttggtgagtagatcccgatccctgtcaaaagcagtcgggaaccttctccgaaagtcaacaatgcctgaccccagtaaggtcgattggaacaatattcaacgtcacgtcatcagcttatgttttacttaaacgttgctgtatcagcaaattatttcctaccagactcgttcgtgctacctgtcaaagactatgtctatcaggcatgcgaggccgcaatcgcggaacatccgtcgctatccgccattgtggcggacggagaaaaaagagannnnnnnnnnnnnnnnnnnnnnnnnnnnnnnnnnnnnnnnnnnnnnnnnnnnnnnnnnnnnnnnnnnnnnnnnnnnnnnnnnnnnnnnnnnnnnnnnnnnnnnnnnnnnnnnnnnnnnnnnnnnnnnnnnnnnnnnnnnnnnnnnnnnnnnnnnnnnnnnnnnnnnnnnnnnnnnnnnnnnnnnnnnnnnnnnnnnnnnnnnnnnnnnnnnnnnnnnnnnnnnnnnnnnnnnnnnnnnnnnnnnnnnnnnnnnnnnnnnnnnnnnnnnnnnnnnnnnnnnnnnnnnnnnnnnnnnnnnnnnnnnnnnnnnnnnnnnnnnnnnnnnnnnnnnnnnnnnnnnnnnnnnnnnnnnnnnnnnnnnnnnnnnnnnnnnnnncacccgtcgctacccgccattgtggcggacgaagacacacgagacccctatttcgtacggctgccagaaattgatcttgaccaagttgtgtctttccaggacagaaaaccaggcttgttaagtaccgaagctgatggcgagcctaccccggatcttgacctgcaaaccttgcttgcgaccgagcataacacgcctttcagggctccaaatcctttctggagagtctctgtccttctagatatagaagatgagcggcaatttactgtggcatttgtatatcaccacgccattggcgatggaacatccgggaaagccttccatcggaccttcctacgagccctaggcgtaacggagtcctcggaccagactatatccatcgtcaagtctccaaacctccctcttttgccaaatatcgaggaagtgcacccaatgtctttttccttactctatcttgcgaagaaaataatccaggaaaaagtatactcccgacgacccacaggtctatggactggctccaaggtcctactccccactcaaacccgcctgcggctcgtgccattctccagactccttgtcaaggcagtaagagacagatgtcgacaagagagtacgacaatcaccgcacttctgcagacgattgtcgctcgctctatcttcgcacacatcccgcctgagttcacgcggctcgcctgcaccggcgcgctctcgagccggcgctggctgccagattttatcactgatgaatcaatgggtgtctgggtccaagactacgaagagacctattcccgggcgacagtcgcaccgtctgaaggcttcccatgggcagaggctagacggtctcgtaagacgattcagtctgttctgaaaatgaaagggaaaaatgctagcacgagtctgcttcagtttgtcgataattttcaggaggaattgtgtttgtccaaggttggcaaggaccgtgataagagcttcgaggtgtcgaatatcggcgttttggacccgcaaacaaatcctgacctgccttctatcaaggggatggttttttcccagtgtgccagtgtgatgggtaatgccattgaggtgtcggctgttactggtggggatgggtgtttggtgctagctgtctcttggcagcaaggggttgtggaagctgatctcatcaatgaaatcgtagaatcgaccaagcaggacctatattctcttgacgtggcgtgatcaatggggataattcttgcttgggtatagactttttaatgtttaatagtgcatccatagacttatcgggagcgctcttcggatgctgttatcaggtgggcggtgagagggcgataacatcggcggcagaatcatagggaatctacagtctgacctttcccaaccttcttgttaacatctcataacatataactatcaactttcaatatgactcgtggcccctacattgttccggcgctcaagaagcacactgccactgtcatcatggcccacgggctgggagataggtaagtgtatcgctggaagatagttaaacgctagtatcaagtctaacagtgttcgaatctagtggtgccggatggtatgaaaatgcccatcaatcgcctagcctaagccaatgatcgtcgcatctgaccatgattttctaatttctaataggatgtcccttgcccagacctggcgccgccgcggcaagttcgacgaggtgtccttcatcttccccaatgcgcccgacatcccgatcacagttgtatgtgaacctcatattcatcatcaattgaatatcaattgacgagatttcaattagaacttcggcaggcccatgcctgggtggtacgacatctcgaaacttggcggtgatgtgagccctccatgcccaaaattgtcgaataaactcatagtcctgaccattatctccttctatctagttggagttcgaggaattccttaaaagccaggatgaaccagggattatccgctcccgcgactacttcaatagcctcatcgagcaagagatggaaaagaatatcaaggcttcacgtatcatcctgggtgggttctcccagggaggtgcgatgtccgtgttcgccggtgtgaccagcaaggaaaagctcggtggtgttttcggtctatcatgctacatgctattgagcgaccggattaagaactacctgcccgaggggtggcccaacaagaagacgccgtttttccttgcccacggtctcgaggataacgttgtcccattcgcatctggcaagacttcggcagctaaactcaaggaactcggcctagagaatgtttccttcagccaatacgagtatgttttggtcgctgttgttctggattgtgatggtctgcttacttgatattcctacgttacagagatcttggtcactcggcgacccccgaagaaatcgatgatctagagaagttcattgagaaagccctcgccactgaaggagagggtagtgcttctgctggcttatgacttagtcatgatcagaacgagaacaccgaaattggtctttggagatataccttgatcatgggttttgtggtactgcttgctgctgtcatctggtctagatatcagttgtcaaagcagaaacaatctatacagacgcagcattaacaaaccgagcccagatccagctttgagatacataatagtgcaattcaataccggtcttgtaagtgtgagtgataaagtcgggcctcgcctgcttagcgtaggaacctcggaatatatatatctctatgtccatatgatgtatttcaccgacgcatttactccttatagctaggggatatttaccgccaggtggtattaaatgtacatttaaacttaagcttgctaatgccaatgtaatttatgatagcgtggtcaatctactacatgtgcgcagttatcctagcatctggtcggtcgaccatagacctagaagaaattctagatggtatgtggatatatgcagcgtgatgcagtagaagaggtttgcttttagattataatattgaaaaactcttcagaagtcggtagttgtacattgatataagcctcagatatcgaggctgcagatgcaagatgagggaagagtcgcaaacgtatcgtacagccaataaaatcatgacatacgcccagggatatccaagattgcagatagtgcagaaacttcgggcattcgaagcctcgagattggaaagaacaattgtgggaggagaaaatggaacactggcaggagaggtggaggaggttcggagatgtagatagatcaaattctctgtgcggacacagcatgatcacagatcaatagtcgaggcgcaatggtctagtcgggggattatttttcacccagcatctccttgcgcatctcctcccgttgtgtccgcgtttgttccttctcacgtgcgcgttgtgcgtctagagctgcttgctttttatctaattcttcctgggcggcgtaccagactagaagaattggtcataaccattagccacggatgcactcccagggccgagcgaacccgataccgcagatataatcatctccagggtaaattgcgagtacaagacatactagacttatcggacttggaccactccttcagcttagtgacgtagtcatcgaattcctgcgcccggcggtctccctgttcggcgctgcgcttctgcagatccgggttgtatcgctttctaagctcttcgtcggagggtcggagatattcgacaagagcggggccaccgacgaccatgaggaggccactacggtgagaaccgaatgtgagcacaagtttttgtgacgatgcaggcgagtatcacttacccagctatggtcttcgcccataatccggcgcgagacattgtggtaaatccgaagcgcggatgctgattaccgatttgaggcttcggtatgacgatgtgtttctcggatgactcggggagatataactcgagatgctgagaccgatggatcattaacatcatcgcggctctcatttgctgttagaggcggcgtggcgcagccgatgtggcgcagtaatacgctttgcccgatcgagcgtgccacttgtatcaatttttgtcgcttgttccgtcattcttgaggaagtagtccgagacaggatgtggagtctgtcatacatatgtatacttacaaagtccatacttccgaggtagcgacatgttatacggagtacaagcttgggcagtcctcaggggtgctgtgctgcccgattggtctagggtttagtttaacttagtcatcatggtttgacctcgggacccctgagcagctgtaatccctacataactatggctaatatcacggagtacaagtacagttaccagggaagtacaactggatgccaacaagtcccgtcgggtttgaaattgagattgtgatgggcttgcaggacgacatagtgtgtaggatcccgggccccagcttcacccctgatcgtcaggcaccgagtggactgaattacatgtactccgtaactttcgagctttaccttcacatacaatgatgtactgtataacagctgtatactgcatcgaagcatcaaaggcagtgagaataataaaaggaatatgggtctatgacgatactgcagttctatattccccacttgcgttagtcctctaaacggccgcaaaggagattggatactataaaaagggaaagtataataaagcatgaagagcatgaaatgcatgaaaagcatggaaaatacgaaaaacaaaacaaaaagtgtctggcggttgtgggtcaagcgatttgtttaatttaaagggtcacctgcgaccgcccctaaatcattctgcccccgcttgctttactctttacttgaacttcactgaactcactttggagtgtggctcctgaccaccctcaggtgcttgatcagcttgcggcaggcgcgttggtcattcgacactgcggtttggctttgcgcgaggtacctaggtaaggatcagtgtggagtcccaagggttgccttctcaggatatccatggatcgtgaaatgaataagctaactccaaattgcagccctggacccctggagtttaccgaactgtcttctccttgcatgcgactgcccacaagatttgcacgatcgtgaacgatcctcgaagactactcgaatcaccgttgtatagtacgcttgtcggcctgcgccatgtcatacccccaacaacatcaagcgcagaggccgcctttgcgacaatacagcaatccccctccgcgttctgtgacatcgccaggaggatattcgcaagatggctcccacggaggatacagcgacggtggcatgagtagccatagctaccagcagactgaccccggctacgacgatgcggcatacagctaccagtccacctcctccggttcgcaatcatatgcttctatgaaatctcagccacgctcgatgcgaccgccgggaccaccaggtccgagaaatggacgaccgccaggccctggatacgatgatcggcggggctatcctcctggcggaagaccacccccgcaatcgcggtcaagaacacgtacgtaaattcagacagggaccccaaagccctactaaccgactataagctggcgcacgcccacccccaggcggtaccttcgataatcctttcccctcctttccaagtcgagacccaagagatccgaggccgcctacagacccacgagatcctagagcacctagagacccaagggatcggcgcggtccgccacgagggctagagaatgatatggctgcaatggacattaatggcaggggtcctcctagatcgcacactgtgaattccgatggaagacggccagatatgcgacagccacctccgcgcggaggtccgcnnnnnnnnnnnnnnnnnnnnnnnnnnnnnnnnnnnnnnnnnnnnnnnnnnnnnnnnnnnnnnnnnnnnnnnnnnnnnnnnnnnnnnnnnnnnnnnnnnnnnnnnnnnnnnnnnnnnnnnnnnnnnnnnnnnnnnnnnnnnnnnnnnnnnnnnnnnnnnnnnnnnnnnnnnnnnnnnnnnnnnnnnnnnnnnnnnnnnnnnnnnnnnnnnnnnnnnnnnnnnnnnnnnnnnnnnnnnnnnnnnnnnnnnnnnnnnnnnnnnnnnnnnnnnnnnnnnnnnnnnnnnnnnnnnnnnnnnnnnnnnnnnnnnnnnnnnnnnnnnnnnnnnnnnnnnnnnnnnnnnnnnnnnnnnnnnnnnnnnnnnnnnnnnnnnnnnnggtccgcgcggacctccaccagggcggggccgaggtggctatccaatgggtccagtgcgagctgctagttcaggcagaccaggtcgacctgatagagactatccagactccatgggcccgtctatgcatccgccaccaagaagcgcaacgatgccgctcgccccaggcgcaccactctactcaggcgcaccactctacccaggccagtcgacctaccaagaaacagattacccagcgagctccatgaaggaacctcttatgcgtcctgatactgctgggagcatgcgacccccacggtctcgtgcccccaacgatatagacccaggactgatgatccccgccactaaattgatgatcccccccgagcccgccaatcgtgtttcatatgcgcccaaggactttctggacagctattatgagtctggtgctggtgctgccgatgaacccgatatgcctaatttcgatgccatgcccgaccctcgtcatgccccgattgatgagatgggtttggacataacacccgtcaagagaccggtccatggaccgacttcttccctcgaagagtactcatatacccccaacgggtcggaggctatgaaatcccaatctcaaccaaattttcaacaagcagacggtgccggtgccaatcagtttgaaaatgcgggatttcagtttggtattcctggagaagcttcccatgctcccgctttcgaccacccaggctctgctgggtatgtgtcgaacggttacgaagattacgccggttactcacatggctcttcccctgtccgatccaaccagccaggctattcccacgaccaggctgagatgtcagatcctcatcagaatcccgatactcttactcaccacccagcgccattccgccccggtcacgatcaaggatccaaacctgcgccggttcggcagtacatcactcctgaatctatcccagcccttgctgctccacagccaatgatgcctagtggaacggttcaggcgcctgtcacgattgaagagatacagcggctacaacaacaggcgcgagccaatccttctgatcagaagactcaacttctactcgtcaaaaagctagtcgaggcttcgacggttctggtggaggacaacagcagactggatccgaaaaccaaagccaaggccaaggagaagtacgtgatggatgcacataagatcctcaaaaagcttgttacagccgggtattctgaagcccagtttttcctggctgactgccacggtgagggtctaatggggctggaagtcgaccccaaagaagctttctcactatatcactctgctgcgaagcaaggccacgcacagtctgcatatcgcgtggctgtatgctgcgagatcggacaggaagaaggtggcggcaccaaacgtgatccattcaaggccgttcaatggtacaagcgcgccgctgcgcttggtgatacaccagccatgtacaaaatgggaatgattaatctaaagggactgctgggtcaagctcggaatccccgggagggtgtatcgtggcttaagcgggccgctgaccgtgcggacgaggaaaacccgcacgctctccacgagcttgccctcatgtatcagaacgctggcgggaatgatatcatcgtccgcgacgagcagtatgcctcccagctattccatcatgctgccgagctgggctacaagttctctcaattcaagcttggtactgcttatgagtacggtctgatgggatgccctattgacaaccgcacgagtatcatctggtacactcgtgccgcggcccagggtgaacatcagagcgaactcgcccttagtggttggtatcttaccggatcggagggtattctatcgcaaaatgataccgaggcttatctgtgggcccgaaaggccgccaccgcaggtcttgccaaggcagaatatgctatgggatatttcaccgaggtcggaatcggcgctgctgctaatctagatgacgcaaagagatggtactggcgcgcagctggtgagttgacctccctttgactgtttttcgctctagccaactaacctttttttcagcccaaggataccccaaggcccgtgagcgtcttgaagaccttaagaagggcggaagccgaatgcaaaagactcgtctctcacgctcagccgttaacaagcagagtgatggggactgcgttctcatgtaattggatatcttcgtccttcatgatttgccacgcttgaaatatggcttgcatgtatgcatctctcttcatgatcaccggcgcttgatgtattctaccccggtccagaacgcttctcttctaccccatggactgctggattactttattttcttacttgctcatatcctttttttttccaatgttcttccttgtttcgaattgctcttcttttctttaccttctttggtcccccattttattcttatttttattttttacgaatgggatgtgcatgactggaatggacacggtgaaaccaatatcaactggctgtagcatttgtatacattaatagattgttgaacgaattttctttttaacgtacgatgtatacatatacgaagaagtcccaattccccttgagatacccgtaaatccgagccaaagctgcagagcggatatatgggtcgtcaacgggtgaattccgcactgactggatttaatttccaatgcttggccttatgatcgggctctctgcgcttccaaaagcatctaattaatcagctctagttccctggaataagttgtctttctttttgtctgaacatttcaatataaatagaagctgtttggtgatttctacaaggtagtacattgccagctccatccgaaacaagccatatatgtcttccgaaagccgacataacgactcggaaacacgaacaccccattcattcagcggacacaaaatcgctcttgtcactcttttgaccgttctcacggctgtacttattgctctattctgggaagacaccgccaatctgttcggcttccgacgcctccttggatcctgcgcgcgctcagcggcagtacctctgtctgcttcaacttccattgcagcagctgcgacagtgaagggaaactcagacgtaaaatccagcatgaaaacacctatttacttcctcagccatggcggggtaagttatctatatcctggttcttatcatggactaaaagctgatttaatacccacagccaaacgtcatgtacgagaccgatcacccggcttaccgtaagctcggggagattgggcgcgagataacaaccaaggtgaagccgaaggctgtcgtggtattctcggcgcattggcaggccggtcgaaatacgatccaggtgaataccgccgagaagactgatttgatctatgagtatgtttgatatcgaaatcatggaaattccgaactaactggatttagcttctatggcttcccaggtcattactataaagagaagtacccaaatgtgggtagcaaggaattagcaaatgaagtcctgagattgttgaaagaagccgatatcccggccgagggcgttgagcgcggactcgaccacggcatctgggctagcttcaagtgcggtatgtgacaatttgcatcaaaacggaaactagacgctgacgaggacactgcagccttcgagccagaaacaaacccactgaacgttcccatcgtgcaagtctcgctcttcaacacagaagacccagaccagcactaccgactcggacaggcagtcgcgagtcttcgcgagcagaatatcctgatcatcgtgtccgggatggccgtgcataacctgcgcgatatgcggtttgcctttggcagttcgaccccgatgccgtatgcggttagcttcgacgaggcgcttaaggatgccgtgacgactgcgcctgctgaacggcagaaggccatggctgagctattaaagagaccagacgcacgccaggctcatccttccttcgagcatttgctgcctattcatattggggctggtgctgcggccgaggacctggggaagaggatctggacgttccccgaggggagtatgagctgggcgcagtatcggtttggtgaggttggcaatgttagtagcgcgttgtaagagatatcatcgaatcatcaccggaagtaattaaattggatttgttttggatatgagcttcgatttcatctataggtacagaagatgggcgtaggacggtgggaacgcggggggcataaaatagatctgcagagaaacaaaaacaagttatagctcctgcttcaccaattgtgtaatgcgctcttcgatctgcgcgtccgacaggcctagaaacatcaattagcattgcaacctgatgcaaaattatggttggcgggggatatttaccggacaacccttcttgcttctccttgccgaaagctattgagagggggggccatgttagcttgattcgcttatccaaagagctcacacaatgggcttagaggtgttctgccataccatatcgggcatagactcgcggctgggtgccagcggcctcccggatcatgatgggagtctgggggttgtgcttcttcatagtcgggtaggcgcggttcaagaaagacctataggcacaaaagaaggtcaatcagtgggctggaactccaatcggctatggataggggtgtacgcaccttgtggccgcgctcgcttcggaggtctggcagaagaggaagcggagctccttgaggccttgagtgaaaacgtacttgccagtcatagtggcaggatggtcaagcatacgtaagtattaggcaaatagaggtctcggatgagccacgggggaatggacgtgggagtagtgggattgatttgctggacagtctgcgatgcagttcattattcacgacggcgttgattcgttgcgcagccataatcccgctagtcccgatatcaactagcgcaccatgcttactcagcttcaacatctaccgaggcctcatatctagcgacagcgcaggagtgatgataagtaggggataattaatcggagtagatgatagggattacttgagagtactccttttatcttctatagactatatttttatctacctgcgggtgtggtgctttagtgcgctatctaccgctcccaacagaaacaccgccgccgccttcaccgacgaccttcccgaggttcatccctcttctttctcctcagaaccaccatctcagctatcaacatgtcttctcgcgttggtttccgctttgtaaacaacgctcgtttcgcgttccgcaatgcatctgcgccattccgtcggccaggtgctcagggcttccgctggcagagctccgaagccggtgctgctgagcatcagaacgccttccagcgtctatggaacagccctgttggtatgaagactgtccacttctggtaagaattcgaatcatgctgcattgcttgtctcttttgctactacgaattgatgctaacttcctgtttcacagggccccggttatgaaggtatgataactcgatttcctggtctgacacaccatctataccccgagctacccttccggatacaacgtctctatcagacttcaccgtatattgcgaggattctctccgcgcctgctgagtacgatgcctaacatattcttctctaacagtggtgcctggtcatcgcgggtatctccgacttcgctcgtcccgccgagaagctctctctcacccagaacgctgctctgatgggcactggtgccatctggactcgctggtgtatgatcatcaagccccgtaacgtcctgtatgtggaacccgatagcagacccgccggccatcaatgctaacacgacataacttcataggctcgccgctgtgaacttcttccttggatgcgtgggtgccgtccaagtgactcgtattttcttgtggcagcgcagccagtctcactcatccctcgaggccgccaaggtgattgagcatgaagctgttgactccgtcaaggctaccgccgaggcggctgagggtgccatcgagtcggctgagggtgccgtgaagaaggctattaagaagtcgacttagataggaaaagaattctgtgaggacggcggggggacttggaagagtgttcctgaatacatctcaaccggtatctatagccacattttacctgcgccgaggtgatccttcaggaatcttgaggtcaagcgagcttgcttgcttgggtcgaccgctggctcgtgtcctcgagaattcagtcctctaattaaacagcgttgtacatataaaccatgtttcgaaatgtttggttactgttccttctgcgagacatggtcaagaattccgaagaaatttactagcattcgtcttgtaatcccaactatcttctgtttggtagttactattcagaaaaccatggtgctgacggtatctcgctccattgcttcgaaatatattggatctagggactttacccaatttatccgggattttcctcccaaccggagaaacagcgccaaatattcctcctatcaaacttgcttggggctatgcttacgcaatgcgaatcaatttatctcctgtctgatctttgacgagacggaaactcactatacaagccattaccataccccggtttctccgcacattgcggagtagcttgtttccccggaataaattgaaggggatgtggttaccccatcgcatgaccgcaaagggggatgcctagctttgacccagttgagctagattggggtaatcgaggaaataaattgttaatgcggagaatatataagctgttctggaggtgctcgagccgagaggattgtcaatctaactcaaagaatcctctatatcctcttgacaccgacgatgaagatttcaagtactttcaaccaggccttgggattttgtttgctaattagtgccgcagttcaggccaagggatactctcgaagcgaggcgtgccaaccgcaccatccattcaagccccttccgggcagccaggccagaactcgcacctgtcatgtagtcaatcatggccatggacgcgacgattcagccaatgttcttaccgcattgaagaaatgcaacaacgggggaaaggttgtctttgatgctgacaagacatacacgattggaaaggcacttgacatgactttcttgaagcatgtggatctcggtatgtaatacgcgttggcgtccaatatgagacgcgtgagtacttacgcaagctgccatagaaatccaaggccatatccaattcagcaatgacacggattattggcaagccaacgcattcaagcaagtctaccaaaacgccaccacgttcttccagctcggtggtgaggatgtcaatgtttacggtgagggtactctggatggtaacggccaggtctggtatgacttatatgcagaggatgccctcatcttgcggccgattctggtaggtataattgggctaaatggaggtaccattggacctctcaaccttcgttattcgcctcagtggtatcactttgtggcaaactcatccaacgtcctttttgacggaattgatatcactgggttcagcagcagtgcgaatgtggctaagaacaccgacggatggtaagtcatctgatcaaaagaggaactagcttcatgtaactaataccttacatagggacctctatcggtcaacgaatattgttatccagaactccgtgattaacaacggagatggtaagtttcttttggaaaattgaagccggtcttcttttactaacagtatccaagattgcgtctcattcaagcccaatgttaccgacattctggtccaaaatcttcattgcaacggctcccacggtatctctgttggctccctaggccaatacccgggcgagattgatattgtgcagaatgtgctcgtctacaatatctccatgttcaacgcatcggtaggtttagtactggagtgacataattgcgtctctaacaatcatgaaggatggtgcgcgtatcaaagtctggcctgggactccctctgcgctctctaccgatctccagggcggcggcggatcgggcctggtgaagaacattacctacgacagcatgaccattgacaatgtcgactatgccatcgaagtgacccaatgctacggccagaagaatttgacactctgcaacgagttccccgtacgtgtccatcaatcttctttgtccctcttttcttcattccgaattgatatcgtcgctatggtttgtttctggtcgccgaaggctaacacatacatcacacagagcaagcttgttattgaagatgttttcttcaagaattttaatggtgtcacctctgggaaatatgacccttatgtgggcacgattgtctgctcaagtcccgatgtaagtgcctgagcaccaccggctacaactccccatctgacttgtacaggtttgctcaaatatcaacgccagtggcattgacgttgttagccccgatgggaatgatcagtttacttgcacaaacgtgggttcatgttgaatattggtgcaacgctgaaaacagatttactgacttattcctctggctgtttaggtcgatgacaatttgctggatttgaactgtgcttcctctagctagtgatgagaagtgttggtacatactgcatgatagaatggatcttgtgagtgtttccggggtttaaatctactcacatcctgtacaaagtacagagtagctacttcatggaaaacgttcacttcttcccgagaccggatttgatgccggtttacaatagccgagcctgcctactccatacccgctccatacataggcagagatagatggtactgtttcccaatcataccctcacattggaatttgctatcaatccagaactacagccagccacatagtctatagaccccactattattacatcccgtgtgcgcctggcgatgcatatgtatgcacacaatctactctggtttccactcgattacgtcgatattctttttaaatatctcccttgcttctttttttttctatgtgggcttttctacaccgcattgctggaactgaactctgtattgttcgggattcctgcgctgagccactgcagacatgtatttaacctaatgacactcccaaacaatattttcataccccatttagaacttctttgcaaatccgagtgacagcagaagaaatttctcatatttgaaatccaatacctttcctctcggccttccttacatcaagatctatcatgcatccggattcccaactcgagaccgccgtcaaaaacggctttgacccaaagagcctctacagtacagagttgacgaaggtcaatgagccagcgagaacgattctcgagcaatacagcaagattccagcggagaaggttttgcaacatgtgaaagatttggtttgtggctcaaccccacacgtgaacgataacatttattgacactcagtagaaagatcgtgcctttgaagttgtgagatctcctctaagtccatcttttctgaggtcaaagggttgttggctgatttgcatacgtgttagttcccttatgcctgtattggacaagcctcattccttgagctgagcatcgcatcgtccccatgttatcctgagatgcttgaccgtgtcaagaagggagacagactacttgacttgggatgtgcatttggacaggaactgcgacaattggtaagttgtgtcgagcaaatgaataacatccgacgattgcatctttcccaccttaaccagagccggctaatcagaataattccggaaattcagatctatgacggcgccccatcgcaaaatctgtatggaatggaccttcgtcctgagttccttgagcttggccttgacttgttcctggatcgctcatttatcaagtcccatttcatcgatgccgatgtcctcgatgataaatctgctctcgttactcagctgacaggcgagctcaacattgtctatatctcccttttccttcatgtctttgactttgaaacacaaatcaaggtagccaagagggtacttgatttgcttgccccgaaggccggttcactcatcgtgtgtcgggttgtggcctgtcgggaccaagcgatagggaacgccaccaacgcgcgcctgccatattattaccatgacttggctagttggaaccggctgtgggagcgtgtgcaggaagagacgggactaaagctaaaagtcgacaactgggaacaggatgatgctttggcaaagaagcaccctctagagggcatctatatgctgggttcatcgattcgccgggagtagggctgctcgtctgtagtacatcacaatgaaacatttgcaagtggctgtattgtatacgtcgtaatttgaattgacgatcacggcagggatggcgaactgaacgctggcaacgagacaacctgattctgatttaagcaggactaactaaagacaagtatgtgactatgcatcatatttgttcattgtcattttatttgaacaacaggtaatacgccgccttcactagttacctgtacatgcatgcatacgtacggatagatgtatttatgtatcgaagttccactattttaaataccaagtacgtacgatacaatcaaaaaagacgagtttatatgtattatccatgtaacggtatgataaggatagtgacaacataaagcctgaacttcgaaggttcttcttctctctcctgatatgttatatctttacccaagagtgatgcaatcatgggattcttttctagcacacaaccacctcgacctgccaccgtgccgagcgatgagatcatccctctccatttctggaatactgctttatgtatgcgcggcacggttttggatatctcgctgaaatttgatgatgtgttggatacatcaaaactgcgcagtgcgctcgaggaactgctcgagatgaaagattggagacagctgggtgctcgattgcgtatgaacgtgggtggtttgagaccggcctccgatttacacgcttaatgctgacccggaacgacctgatagccaaatggaagacttgaatatcatattccaacgcgtttcgacgcctcgcggccggctttcgccatgaccaatgctcagcacgagacaagcattgccgaccacccccttggcgccagaataccacatgcaaccagcacgcctgccatctttccatcacctgatgtgttaagccctttattacgcagcgaagacgcacccaaaaatattgatgactggatctgttcagaccggccccaactatctatacatatcatcaccttcagtgacgccacactaattactgtcacatggctacacacactgacggatgttatgggaatggcattaattttgaatgcgtggactgctctacttcgagggaacagagaggcggttcccaagctacaaggtttccgactagacccgctcacagaactcggccagcgcaccccagcggaaaaatacatgcatttcaaccgtgtgtttggccgcaaagagttctggtggtttatcggattgaatgttcttgacagactgtggtaccgccaggaggagcggcgtaccatttgtattcccgccgccagtttgcggaacctctgccagcaatcatccagtgagatctgcgcttcacgcgggaaagaagagccagtgccctttgtgagtgaaagcgatgtgctgttgggatggtgggtgcggagtctttacagcgcgctggggctcaggacggaccaaactatcctagtgaacaatgcgctaaacctgcggacatctttgcatgaatcctttacgtccaacaatagtgcatacatgggaaatgcactgtgcatgtcgccgacctttctacggggccatcaggttgccgacgagccgttaggccaaattgctctccggattcgagaatccgtaacggaacagcgaaccccagagcaggtcgaggcgatgacagcacttcaaatgcagacgatggaacagacaggctatctggccttggtcggcgatcctcggatgatgctgctatcttgctccaactggcacaaggcccgtctctttgacatagacttctcgtcggccgtgttacaaagcttgggtccgtcgagcctgcagaaccctcaacatacaggaaagccatgctatgtgaatggagttcagcactccgcaaattcatttcgcaacgttctttcagttataggaaaggatgctggcgggaattggtggttaaccggtgttctacgaaccgatgcatggacgcatatcgaaaaacaattgcacaaattggggtcgagctaggttgtattcaaagtatcacaattaatgagctatattcatgtgatgtttttttatatcggtgtacggtgacttgaatttaatctcttggatttgtatttccaaggttgcgatacttgcctttcctgtaagagtaatgtattggttaagcacattatcccgatataaaatacagagcgtgagatatgttctatacggagtacataaatacacatacaactaaaatactcgaaaaccgaaacgaaattgttttagcgtgagatcccgtctcgggccgcacgggacggactagacccataatcaaatacggctatacggtatgttatgtgtgtgtgcatacctgaaatgtgatacagctatttacatagcaggtgcagtgacgatccattgatatgtaaaatagtacgtttaaagtccgtatcaactctaattacatgacgacttagtagacttgtagatcggatcagtccttgcattagcatgcgttggcatcggatatcaccgaaagtagaaccatatcctgcacctgaagacacactcgttctcattttcgaaattctgttgacaaaactgctcatctgagatcctctacacaaagcaccaacaatggaggaatcgagcctgctctcagcaatattggatcatagagatgccttggcatctgtcgcagaatttctccgaattctggctggaatttgctggactttaaactacttcagcatgttgcgcacgtcgcgaaaagacaagattcccagcacaggtatctttcctctctgtaatgacattgggtgggaattcatatatgcctttatctacccaaccgcgagcgctcattgggaaggaggagtccgagtctggtttttggttcattgcatcgtcatcatcttcatcatcaaatatgcgcacaatgagtgggaccactttcccctcattcaacggaacctttacttcctatatggagtagtgactattggcttcgccatcggccaatattcgtttgcgcgagaggttgggcctgacttgggatttttctacgggggtgtgctgtgtcaaacgctggcaagcctggggccaattgctcagattctttctcggaatagtacccgcggtgcttccctattgacttggtaagttcaaagctagatcagctgtttgcattcgtcattgacatgataaaaggctattgagagcgattgctacttttggtggattcattaagttgactatctattacctcactggaaatgctgcaggaccttggtttgaaagcccaatgtgcaagttctatatcgggttgactttggttcttgatttcacctatccgatctgttactatgtcattcagcgtcaggagttggccaatgctcagaaggagaaaaaggagaagagcaaataggaaaagccatcatgaagcatgatagctggatgacaagttgttctgtgaggagtacggtataatgctaggtggttcggcaaggatgaaagttgggttgcgttcaaaagtcttacatctccggtctatgtatttagcatgaaatcacatatttacgaagctcaagaagtgtcacaatacatcaataaaatcctataaaaaaaaacaagtatctgcaaggagcgaggattgcgcgcattggaacattttatagataaaaaagggacgaacccaaaaaggaaaaaggaaataggaaaaccgcacatagcaaggcatattgatcatcaagggggaaagccaacaataacttgcattgtacctatcaagtgaagcggtacacgtccctgtttcgtaacttcatttatctccgacattcttcaccgccaacaacatcattatatgtagcactagaaagatttgtctttttctaaatgcagacatggaggaaggcatggaagctcccaagttcaaagtcatcattgttggggggtctatcgctgggttgacattagcccattctttgtcccaagccaatatcgaccacgtcgttctcgaaaagagagctagcattgctccccaggaaggtgcctttattggagtctggcctaatggagcacagatactcgatcaacttggtctctaccacagtctggaaaagctcactgcaccactaagtcgcatgcatctttccttccccgacggatactcatttagcagtctcctgccaaagacaattcatgaaatgttgcttcccaatgtctctgaaacccagatatcaaacaaattctgactactcaaacgtagatttaagtaccccatcgtctcactcgaccggcaaaaggttcttgaaatattatttcagaactatccaaacaaggaaaaaatcattaccaaccagagagtatccgaagtgcggttattgggcgacagtgccagtgtggtaacagaggatggaagtgtattccaaggagacctgattgtcggcgcggatggtgtccacagccgtatacgctctgaaatgtggcgactggcagatgaactacacccaggaatgatcacaccccaagaaaggcaaagtaggcaacatcgtcctcttcggaaattgattactttggagacttcaactgactcctgaatttcttcccgttagctcttacggttgaatacgcatgtgtgttcggaatatcacgagcaatacccggactccgaagcggagagcatataaaccattacggcgacaaattctgtgtgattaccttccacggaaaggatggtcgtgtgttttggttcattatccaaaaattggaccgcgtttacacctatcctaacgctcctcggtattctcctaatgatgcagcggagctgtgtgacaagattcaagacgtgatcatatggcgggatatcaccgtaggggacctctggaagaccaagctggtatcgtcaatgacggcactcgaggaggggctttttgaaacgtggagcttgaatcgaatagtcatccttggggatagcgtacacaaggtgagatctgccagctatcctggatgaactggatttccaatgatctaacaatgtttcctcttcgccagatgacacccaatatcggacaaggcgcaaacacagctattgaagatgttgccgtccttgcatctctgataaatcgggtagttcacgcagatgccttgcacaaaccatcagaaagctgcatcgagacaatgctccaaaaatacaagactctccgatacgaacgtgcgaaaagcacatacgaacgctcgagatttggcgctcgattccatactcgagacaactggcttaaggccctggtgggccgatatgtgttccaatacgttggtggcctcatagagaaccggacatccaagactctggcaggggggaacgttattgattttcttccgcggccggacaggcttgagactgggtgtgtgacacgtcttcccaaaggccaaggaaggcctcagcagcagtggacgctactctgggtttcctctctggtcttattcttgtttttaccttggcttagatcgtatctgccttcggccaccttctggtgaatacttctcagcagaaaacatttttgcagatctttgtgaaggaacttgtgtatttgtgtttcatatgtgacagtgtcagtacaaagataattcaagtatcgggtgtcgatcatcaacccgatgagattattcgctttcgaattattctaaaaatactagtgggcctgactagtatcattatcataaattgatcgacgaaggcaaaggcgcaaggcaggctagctgaacaccacataattacacaagggggtgtgcatataaatctagttttataaatatagtatggaataatcgagctaatgcagtagatccatgcatctgtaaccagccaacaaaagctcgctcaaatggaataagaattagctggccatgcaatcagtggagccaaagagggcccaaggaatgatctcgatggcgaaagggatgctcttgttgttagacttttacagatgtgtccttgaatactttccacttcgatttgacttatctgatacctgaagtgacctttaccgatataattcataaacttctttctctactgtcccctttatcatttaatatttggctgtcgatacgccttcactacatatctacaccattgttgcctctgcatttcgcccatttcgcacagtggttcagtattcgctgaagtcctcatccccgaattccattttcatatgccacgatgacacgagggaatgaaaaagaagaagccccaccacaggccaaaatccttggctcgtttcccactggaatagcaccctatgccgagttgatgcgtgttcatcgactgttgggcttttacctgaatacatccccttatcttgtgggtgttgccttttgcgcatccatctcacccacaaagataccaatcactgttctcttgcaccgcaccatacttctatccatctggtctattttccttcgaagtgctgggtgtgtttgggatgatcttatcgatatggacttggatagccagatatctcgaaccagaacccgaccactgccacgaggcgcagtatccccgaagaacgctttccttctcactgtgactctcttcgcctgtgggggcagtgttttgatatatcttccatggccctgcgccgtggattgccttataatcacattttttgcattattgtaccccttcggcaagcgattcaccgactatccccagatcactttggtgaacatcggatgggccattccgatggcaatgcacagtctcggattagatcctctatcccagatgaaaccaactgtgtgcatgttcctgtttattggattggtcatcatcatgattgatgtaatttattcgcgccaggatacggaggaggacttgaaggtcggcgtgaagagcatggcggtccgtttcagggagtccatcgagctcctgtcatattctctcctttatgcatccaccggattcctcgcgatggcaggattcttcactggacttggcctgtcatttttcgtggtgtctgtcggcggtcatttctgcgggttctgggttctccttaaagcgactcgggtagggaactcgtatggagttgaatcctacgccaagtccgctttcttccttgctactttgttttggttgtttggatttgtgattgaatattgcctgcgtaactagatgactttgatggttctctacttgcgaaggtaacggggagacgacagtttatccaacgtgtgtgccattgttcacctaactggtggcccaccccaagtcacgtgactgatggcctatcttatctccaccggttgggtcaacttctgtaatttggttttaagcctcaccaatacctcaccaataccaactttccaccagtcatttctcgtcaacacctctcattaaccatccagtggaatcaggaagggataacaccttaatgaaacgctaatagtatattattctatgcatccatagaatatgtagtacagtatatctgtctaataacgccttaaaaagatctaaatgtaattaagcctccggtatttatgatgcgtattctcaagaccattaagtaatcactgataagcaaccttggaagttcaaccaaccggtggagatttcacgtgactcaggtgggttaggtgaacaatggcacacagattggatcaagaactcgagacttaatacctgactagcgctatacactttcgcagtcttcatatatatcgagaagtaaattttcaattgaattttattaagatttcaagcccaacgtttggttcattcagctttcctcccgttaccgaatccaaaattcaaaacgaatctccagttagatcacagaccaggcgttgtcgatgggaatgattgccccgttaattctcttgctctgactagagatcaggaatagaagacagtcggcaatatcctcagcctcaacccccagtcctttctgcctatcagcagcatgtgcctggtgaattagagacattgttcctagtgcatccttgtcccaagtgcttgggtcagaggcctgtactataccggttggaactcctagtgtaaatcataagcttctaacacaaatttgatcttaatagcatatgttggtccacgtacccccgggacaaacggcattgcagcgaattccctcttgtttgtacctccatgcaacatttttggttgcgcccatcagcccatgtttacctggaaagtaggtctgtcactatgctgatgcatacctcgattcatatggatatactcactagctgtgtaagcaacgccggacgaagcaccactcgtagctgccttgctgccgacgttgacaatactaccactctgttgctgtcgcataataggaataacctcacgcatgagcttcactggagctgtcaaattgactgcaatgcatcgttcccacatataatctgagagactatcaacgctggaattctggtccatgataccagcaatgttgagcagaccatcgattcgtccaccaaactctttgatacaggtctctaccacctgccttggtgtcgtctcatgggtgagatcaccttgcatgaatttgtaatttggatgttcattgagtgagacaggtgctgatgagacatcaacacctagaattctcgccccttggcttagagctgctgtggctgttgccagtccaattccagaggcgctaccggtgattatcacaacctagaacgcaattagtaagaaatttggacgatgagagatgttagcagctggggcattacaatgtcttgaagcagcgacataactttggtataatgagcaacagaagaaaaagagaaatgacagtccaattcgattgggaggtaaaagtagaccctggaaacagtctttgagtgcagtctctaggtttacacccactaacctttgcagtaccttatccaggccgtgtcttcaaattatttcttggccccgcatatgacagagaaatctatgatcatcacgtgtatcctgaacatcattcacagactgactagaaatgtgactatacgaggcaaggggaccagatgcaacacgcctctataactctatgttatggtgcttatcttgcatgcaataaagccaccttctgcaacatgcggagcagtggagctctttgtgtcgatctcaagatcaacaaggaaaaagcaatacacattgtgacacaccaaaagaacaaagttactcagctcagccacatgatttaaggactgcgcgttaatgcacgttggactgcagagctccaaaaattagctcagttgatagatcgtgttttggcctcggcccctgtgggaggtattctgggccctaattactagtcgtaataatacggcaaagaccgcattgtatatttggtcaactatctatctgaccgctgttttcgatcgtgggagtctttgtggcacagttgaaggtggcatgagcaatttactacgagtttcaagcaaatcccagtatccgagaaagcttcttgaacaacagaatgacgcaggctcagaactatgtcattccaccaggctctaaagtcctcgttactggagcgaatggctacattgcctcgcacatcgtcaaggctctattagatcttggttatctggttcgaggcacggtacgcacgcctatgccatggctggcggagtatttcgagagacagtgcggtttaggacgtttcgaactcattgttgtttcggactttcagcagcccgatgcttttgatgagagcgtgaagggtgtatcgggagtcattcatgttgtatgtttctttggtactagtggttctgacaacaatatgtgttaaccaaatagatgtctaggctcaaggcttaccttctagcactgctgcagaaaccgtgaaaagcgcaacagcttatactgtgaatggagtcatcaatcttttcaaggctgcatctacacaacgcacaattcagcgagttgtcctcacttcttctatcgtagcggcaggctaccctaccggaaaagggttcaagttagatgctggtaaggcaactgtcaatagataacaaacctaggctgacagaatctatatagattcatgggatgaaagcctcgaacaggcatctaaagatggaaccactgtacccatctatcgagcatgtaagatcgaaggagagagacaagcgtggaaatgggttgagaagaaccaaccacactttgagctcaattccgttcttccatggcttacagtgagtcttatcgagaatcatatgtttatatacgacgtcaaaagttgaactaaccacggattctttcgaagttgggcaaaattcttcatccgaacatcggtggttcaaccatgggatatgtctctggactactcagaggagataccacgccattcaaattccttccactgcgttagtattccaaatcaaattgacagacctattattgactaaagtactttgctagcttggtttgtggatgtggaagacactgctcgtctccacgccatagctctgctcaatcctagcgtgcgctccgagcgactcttcgctactgcagctccattcacatggggggatgtcattgaaattctcaaaagaatccaacccaataatgctcgtattccagctgctcctatacaagaggaaccgacgctcggagatgtcgtcccagcagcaagagccgagaaattgcttcgtgagacttttggacagcttggctggaccccactggaagtcagcctagagagcggtatcgcaagagagtaaccgatgaggtccggtggttgaagatgatatggtcggactaatcgagtacaatggtagattattgtgatgttgtgacagttcatatctcgattgaaattcaaaacgaagggttactagatcaaaaataccatgcccattaggggatctttccctctgacttcaagacttgcgttaaaagatcggggagggctacagcgatccccggctactgtagatcgacccctctctgcctgaaatttcagtttcaccttcctaattgggcacattttctgcctcgacacctgcccacaccgccttctggccttgactccccatataatagtagcaagacagcagatacctacaagttatatgtaaaccaatagcaaaatttcatcagccgctttaccgtcaagggatgaaatcctatagtaatcaggtagaatatacgaatttttctgatcaaaatacatgttttttactatgtaaaccagaatgcatgtagtggtggcagaatatatgggggacgccgctgtggtcaaaatatataccataagtgatacctgtatgaacatgatcataggaagaggactgatactaaagctagattgatacagaaagacattgtaagagcatccgaaaggttcattcttatattaatgtgatgattatcaccaggtagaattaagatacaattaaacatcgagagtgccgatcgactaatatcgaacatgatcacgcaaaaactcataaccatcttcaacagcccgagaagctgcctggtctttttcaaaaccaggataaatgtcaaacaggtgtactgccttatccacaactcggagttgtacctcaacgcccttcgtaaccagctcctgtgatgtcctttgggcctgttccactggaatgagatcatcaagggttccgtgtatgatgaaagtgggcgtcttgtaatgcccattgcgaatctgtgccagagggctcactgcttggatttcctcaagtgtcggaacgggcaactcctctccacagtcgccatctttatgatccgaccagaagcggccgccgtgaagcaacataggcaggctttgtcctttccagttcatgtgcaacgcaattcggctgcgaggatccgccggtgacatccagcctccaagggccttttggtcgaccggaggattgtaggcagtgattggcgtctcatatatgccttcccacaggtcgtatcgcatttctggcgaggcggcattctttccgtaagggaaattgggctgggaccaaaaagagtcttcatagtctgttgggccgtagaatgcgaggatagcgttaggcggggctatgcccctctgctgagaagtccaagccaatgtcatggccagatgggcaccagtagaccagccaaccgctaccgcttgagttccgtctggttggatatcaggacgaccaagagttaaactgggcaggacatggcgagcccaacaaagagcatcgcatacatcatgcattgggccttcggtcagggaaacctctgggcagagtcggtaatcaacactgactggcaagaatcccgcattcaagagcattctgacttgcttgctgcggatgtcccggcgcgagagcataatatgcccgccgccatggataagaagagctgtttgtcgagtgtaagaaggagggttgtcacggttcgaggaaagaggactgggaacaagttcgtctacataccaattggacggggttttccaataggctgaagatcccgaggatagtaaatgtctgcagagagctccacgccatcgttcttgccgtacacaatagtctcttcgttcatgagatataaggggctcctgggggacgggggtaaaatgacagccgaggttggtgacgcagtgatcacccgaagcacattggattcttgggagtcattgtatgtccagtccacccattggaaacccgattgggaaagagtttgtttccacacgtgttcggtcgcaagggcgtgttgccgaccatcctcaaagagccaccagccctccagcagaccgaagacaagatcaaaccagaataagttgcgtgtgagctcgattaggcaaagaagcccgtctggccgtagaagcttgttgatattggaacacgattgaacgagactgcgggttgcgtgcacacagttgctggataggacgatatcatattgaccgagcatgtctggggtaggagcccgttcaatgttgaggacttggtatttcatgaagctgtaatgcttgaacttcttgcgtgccagagtcaggagccccgaggataggtccgtgaatgtgtattggaaacgaagaccaggaacggcagtcagctgacttaacaaagctttggttgtgcccccagtgccacctccaatctcgagaatcttaatttctctggtggtatccacgcggccaaggaggttgacaagatattgggctaggtggttagttgcagccttgaacattggagcgttcgtgtatacatcctccatcagtcgacgagcctctgcatcttgaaagagaagagaaagtgggtcggcggctccgcttaagcagtcactgagtcgcgagcccgttgtcctcagcagattgtgttcagatgtatgctggggatagaggcgaataatttcctcgtgcaatacatcggacgaaatggtggatacgggaaccgaagttcgcacaaagccatggtcagtagcccggatgagattggaaaactgcaagatggaataaagctggcttcgaaccttgctatgctgttgaagaaccggcacctgtgggataagatgctcagcctcaaagctctccagggagacaccgagggatttgaaagcctctaccacataagctgtgacaagggccatctgtctgggatatacggattcacaaaacccgtcccattgggtagattgactgtgcaccatacttctctgaatatcagtgaaaaggccgggtgcaatgtcaatgaggccatgtatttcttcatcggaaattggggttgggataacatgggtattcctctccgagtcaactgcttctgtagtctcgatttgcaatgacgggtgaactccatttgtgagaggagcagttgcggcatcggggaaaattgtctgcaccagcgttaggatatcggggatctcaacgaaggaggaagtgtcaatggtgaaattgaatctcttctttatctccaccaaaacctcagttcgcatcaacgaatcaacaccaatgtcttcgagattcgatgatggcaacaactcatcggaggcaattcctaatagatcacagagcatctcctggacgaccataaagtgtccactatccggggcagagtggagaggagccggaacagcggctagtgcattctgaggggtaggattgagtgcaaccttggagtcatcgcgaagagactggcctagaggcacttttttgtcgtcgggttgattgttcaatttcttgagtacccgggaaagaccggcgatggagacactggtaaatgttgccgaaagaatggtgacagcaagtttatcggtctcccgatctaggacaaacgtatcacaagtgatcttattcttgatagatcggtccacgttagagtatacagcccacgaacgcgagcaattgggatcccgggtcatgaaagcctctccaatcaatatttccccaaccccagtgcaaacaaaaacctcatcttcttttgtctccgaaagacagttgacgtggattccagcgacttgaatgaaattgtcgacgagcattggatcacatgacgcgtcctttgtccgggacgaggggaggttcacgattccagcggcctcatgatcagtcgcgaacacttgttcaacgccacgataataatcagcgtaattgacaactctgcggaaggcttgatatacggcgaatcctttaagaccgctcgactctcgtgaattggcgatggagtccactcgagaagaatcaatcaatcggttcatggagtgaagtcgaacgaagagaggtgtattctggccgaaggggtgcaagctgatctcaccggttgcatgtgtggtgactttattcttgttgggctcacgagtgaagagggagaatgaccatggggagtcacccacccgggcgcgagtaagactcaacataacatttcccctagggttgagcacaagcggagccgaaatggaaaggtctttcaggtgaggcatggctggtgatatatcgttttctgggcgaatcagtcccgccgctcgaacaataatctcaaagtagagagaggcagggcagaggttttgatcaagtactgcatggccttgtgtacactcctgataaagagggtcattcgtattaatggcaaacacacactcggtcggctgctttgtgagcagctgcacaaactctttcggggcatcagaagaaggcacagttggcttgacttcaggcaacgacgcgaaggcatttgggtcgtatccaatccagtgacgtgtttgagcaaactggtaaggtgggaggttgatccagttgtagctcttggcttgggaatcgtggaactgccagaactgtaccttcacacctctagaccaaaggttgcacgtagcctgtgaaaggcttctgtgggccagtgcgcctcccaagtcgagcgcctggtagacatgcccatttgaaaaggctgccactgtatcgataactcgtcgtaccaacgggatgatgggagatgcggatcccgcctccagccagatagcagggccttgaatcctctgggccacccgctcaacggctgtctggaagtcaactcgtctgcggctgtgatccacaatcttgcctggggtaacataagtccagtcatcatactgagaacaagcctcaatagggatagacaatggcttgtattgaagctgctgggctaccttggtcaggggaggaacaatgttatcgaccaggcgggaatggaaagcatgtgtgttcttcaatctctttgtgcgaaggatggagggggctttcgccgacagtttctcaatcatttgtagggatcgctcgtctcccgccaatatggtattacgtgggccgttgacacaagccacatccactgccacatctgccatatgctctgctgcacgattcagcaaaccctgtacctccacctctgaaccctccactaggagcatagctccacgctcagagccccacatgctgtggatcatcttggctcgctccgagacaagataaagagcatccgaaaggctcaacccgccaccgacacagagtccagtaagttgaccaaagctatggcctataattcggtccacttgcagtccggaatctatccatgactttgctgatgcatattggattgagaacaaaatgcagtgaaggctgacggtatcttcaattgggccaggttggaagatactcggaaagaggctcggaaggtcaagagtttgacaaactttttcacattccgtctaagacagcgcagatggactgttagcaaacaaaacatagagaaatcgagatatttccaaggcttaccaagtgatattgaagcagttcacactgattaaacaggtcttcggaaatggttgcttcgttcccattttgcccaccaaagcacaagacgacgggcagacgggccgccggttgtttctcaagatttgtagtctcacatgatattgactctagcttcgcaataagctcgttgggtcgatctacaggaatgctgaatgctgaaacgtagtccatgtctctgctctgcttgattgccaagttataggctgtgtcttgacaactggtcagttgtgcatcgcagacgcttgaaagcagagctttgcagtatgatctgagtgattcaacggtgttggctgctagaataacgggcacctcactagggaggggagaaactggattcgaaaggccagattttgctttgtattgtttcacaacaagagccgcgttgcttcctgcagctccgtaattggtcaccatcgccacagcagtcgaagatgaattagcagcggagggccagtggatagacttggttggaattgcgattgctgcatcgtccaatgtgggaatcttggggttcagttgaacgaaattggcctgcttcggtatctggtgtttctgcatcatcaggacagtctttagtaggccagctacacctgaagaggtttcagtgtggccgatgttatctttgatagatccgacataaagcctttcggtgcgcgcaggtcttccaaacgttttgcggatgctctcaaattcaattgggtcacctacttgtgtgccttgttatttgtattagtgaatatatctcaaattgttggtgtggcttgacaaacctgtgccatgcgcctcaacataagtgacgtcttctggacgaaccccagatgtcacgagggccttccgataaagggatatctgggaatccgagtctgggacagtgattggagagcggttggacccctgattgaccgccgacccaccaatgatggcaagaatggggtctccgttatgaattgcgtctttcaagggtcgtagaacgaccagccccgccccctctccacgacaataaccatcggcactcgcatcgaaggccttggaagcaccagtaggtgagagaaaggaggctgccgccagattttgtgtcactctggggctggtcatgacatttacgccgcccgccacggcaatagaacattcattagtttgaagtgcctgcagtttgttaccagatcaccgagtcagtcacttcttcgtcgcccgagaatatcgtggtttgaggagtagaatcgaatatggaatcttaccttgcatgcaagatgaatagacaccgcagctgaggagcatgcggtgtcaaccaccaccgatggcccagtccacccgaaatagtgactaagacggccagtacagaacgcctggagtgttcctgtagctgaaaaggcgttcgcgttgcttgatccaacattgtcagtatagtcgtccgagccgacaccaacataacaaccgacgtcgcttgggatattgaaggtgcggagaccacaatatccagctgactccatagcctcataccctacctgaaggagtagtcgttgctgggggtccatagcctccgcttctcgggccgaaattccaaagaagcgatgatcaaacacatctggattagccagatagtttccccagaatggcccttttggctcgcgaagaaggttttccatcttgaatcgctcgttgggaagtgcgttgacaccacaccgccccagctcgagcatctcccatagttgctctggagaatccgcttgggcatatcggcaccccatgccagtgatagcaattggggtcactgtcgggccgataggggccatatcaattgaaggcctcgatcgagttgtggaagatgatctgtggattccatttggcagaattgcatgttgttttgtgtctgaccacttgttgttcaagtgatctagaacgcgggttctgactagacgtggaacaaactggccagttccaatgaccacgaaggctaaatcgtcatctgtctctctcgcttgctcaaatgcggctgaaacagttatagcccactgtgatggcttggtcaggattgattctagggcagttttgtgaatggcaaatcgtttcccaatcacatggccatcgacattggacctcagtggaagaacacagggactagtccttgctaaccggaacctggcatctgtctcacaaagatctgcaaggtattgaacagctgtgacatgtctcgaatgatgaaatcttcccttcaggtcaatgattttcaccgacaatccatgacctcctagctccttggtcaaatcatccacttcatcttccgcgactgtgactgtgactgaggttgcatccgtaaagcaggagatgtaggcctatgtgttgtcgatattagattatccgttcatcacgtatgtggatcctcggcccaatatcaagtcacatgatacccatatcaacatgtgtcccccccgttgatactcccacaacctcgtaacccactattaagcagagggaagataatttgaagtagaataacatggggttattggcggggtggatatgttacgcaccgttgaagagctacccaacactcgatcgagttgttctttctcactatccgacttccatctcaaagcaacagatcgggccggaccatgcaagatgccatccaggtcaactgctgctccaatgcaaactgccaatcggatcatagtggatgcgatgtcctcaaattcgttggaatcattcgagctagcgactgcgaccgccgctaagaagccgacacaaaacccctgggcatccacgattctgcacctgttctgggactcttctttgaatttccacacatcgattatctgtcgaataacagtgagaggcgtcatgaacacattcattgcacttttgggagcagctgtcgtcccctgaacacattcagcaagcaccgtaagttgtgtcgctccagggattgaggataaagaggaccaagcatctgtaatgggcgaccatagcgacggtagttcttgcaagacatccttgaggaatcccaacgatggattttcgtcgatgttgcggctgatgtaaaataaagtttcatcaatctcggaactctgggggccgaaaacaacacagacgggccgacccggggttttgggtggttcggccatggcaagttgaatatgtaaagcaagattattgtgaggaataagacaaagcgaagagaggcagatactcccaagttggtacctgatgttgaacaggtttcagtgtcaagaaggaaccttgtccatcgaggcacatcaaggttataatggaaaaccgagggtttagaaaaacaaataccgatacgacctgcatacaatatctgagccaaaagcatgtacggactcaccatagatgatagataacccgatatagcagtgtctctcccttgctgtttgactctaaagctgaagacacagcgattctgcacgcaatatccacccagctgcgggatcttcaatggatcagcaccttatggcgaatataccgatatccagggctcaccttctcgggggtggctggctgatgaagatagactatgggacggaacccccgacaaacttctgaggcatcagacttttttaactacactcaataaatatattacatacatatgtacggagtatgtatggtacgcttaagttgtcgtttcattctttggagtggtatcaattggtattctctcgaattctagttcgccctgccgtacggagtacgtactccgtacggtatttcgctgatttgttgatttgtttaaggttttcttttcggatgtttaatttatttctaatttatattttaatacgagtcaattatttcatgctaggcacatcggaatgtgacattggcatcttgcattcatgaatgtttatttatttcctaggttagataatgcttagtctacacccgtgccagggaagaaagagtccgtggggatagcatagtccttgctttatcgtgctaaatatatatcttgcttggctctgactctatatggagtaatccgtaggctgaaagtgattagtttgttgtctcatttttattatggctcaaataattgcttgccctaaagcatacatagctatggcagctttgggaatcgattagttccaaatttgaatcatcaatatatgttgggttgagtacaggtttggcttactatggagtatcttctttatgcttccccattcaccgagccttcaatactctgcaatcatagacaagcattgggggaatgtcacccaagttaaagaatttactagtcatgctagtgccgtcattggtcgaactgttatagctcagacgcaaggcatacggaataaaaataattggaagatgatcagacagagggtaatttcccagtacaaaaatttcacaattagttaggcaattgcaccccatacagggatactcttttgaaacattatccaagttttcatccgaatccagttgtcagccacatcacgcatggctccagaagaaggcgaccaggcgatgagccacgaagacaaagctgcgtgttcgtctctgaacatgacaagctccacagagttattcgacggagcaccatcaagtgagaatgagcggcttcgcattcggcaggctgcagaggacgcaatgcaccatggatctcccaaaatcgaccctcagatctggaccgacgtgacttctcacctcagcggttctaccacgatagatgcccgccaacgggacattttttttgagaatttgactgtccatggaaaaggatcctcgctacaaatccaaaaaactgttctgtccgcccttctataccccattgcgtgccctgtcaaacgactcatgagcattgttggtaacaaaaaaccccacaatgatcgaagaacaatattacatggattcaacgggattttaaacagcggcgaattgttgctggtgctcggtcgtccgggtagtgggtgctcaacgttcttgaaatcactatgtggctaccttgaaggcttagatctcgacccagtcagtgagatccagtataggggagtaccattcagagtgatgattgaaaagtaccggggggatttagtgtacaaccaagaggcggatcaccactttccgaacttgacagttggtcaaacacttgagtttgcagcgcatgcacgagcaccgcataatcaagtaggcaattcgagtcgagaccagtatgtcaaatccgtggtgaaagtggttatggatacatttggtctttcccacacatacgacacaaatgttggcaacgactttgttccaggagtcagtggaggggaaagaaagagggtcaggtaagctcattctgttcggcttggagcaagaggggagaaggaaagggtatgagaactgatacaatagttggtatgaacagtattgcggaaacggttttgtcacggacttcgattgcggcctgggataacagcacacgtgggcttgatgcagccactgctgtcgactttgttcggtcccttcgtacctcagccaaactagcgggatcttgtcatgcagtcgccgtataccaagcctcggaaggtctttacaataccttcgacaaagtcattcttctatatgaagggcgagaaatatatttcggctctcgtcaaggggctgttgcatactttgagacgatgggatggaaacgaccaccacaacaagtgagtgcggatttcctcacagctatcaccaacccaggcgagcgacaaccacaagttggcatggaaaatgcagtcccccgcaccccagtagagttcgaaagttactggaagaacagcccggagcatgcagagctggagacatcaatgcgacaatacaagatgaagacccctcttgatagctcggaggagatcaaattggatgaaattaagcgccttgagcaatcaaatcatgctcgaatatctagtccctatcttctctcggtgcctatgcaaatcagactatgcattgtgagagcttggcaacgcactcgcaatgatatcccggccttgattgctacggcagtggcgcagacggtggtatccctgatcattgggtctcttttttacaatataccagagaataccgctgggctcggccagagggcatcggtcctttttctcgctgttttgacaaatgctttgatatccttgttggagatcaccactctatatagccaaagattgatcgtggagaaacaagctgcctatgcctttgtgcaccctttcacggaagccattgcagaagttattgtggatttccctatcaaacttttccgatgcctcttatctgctatcatcgtatattttcttgcaaatctccggagagaggcctctcatttctttatctacattatgttccagctcacagcagttatgacaatggccacgatatttcgcactttggctaccgttaccaggactatcggacaagctatggctttggctggagtcgtgattatctgcattgccgtgtacactgggtttaccgttcctcagttcgatatgccgccatggtttggatggatccgatggctcaatccgatattttacactttcgaaggcattgtctccaatgagttccacggtcgccattttgagtgtgtggaatatattccaagcttaagtttcgagcagggactatcattcacctgctcatatgtgggatccattgcgggggagcggtatgtctctggggatgcatatattgcaggcaattacgattactcctacgatcatgtgtggaggaattatggcatcttggttgcttttcttgtcttcttctatgtgctttacttttggctcacggagttgatcccaggaaccacaccggcccacgaagtcttgatctttcgccatgggggtgtgctccaaaggttgattcgaggtgatctggaacgcggagagtctatacgtttgcaggaggtaaaatcattggcctctgaggtccattcatcaaaagcagaacaaaagaataccttcagctggaaaggactctcttacgacattccagtcaaaggtggtgaaaaacggcttctggatgatgttagtggttgggtcaaacctggatcactcacggcactcatggtatgcattatttccctcttctgaatccatgacttccacctcacaggcattgacatgaatatagggcgtttcgggtgctgggaaaacaacacttatgaacgttttagcgcggcgtatgactatcggagttgttacaggagatatgtttgtcaacggccgcgaacttgatgctagctttgcccgaaatattggctatgtccagcagcaagatcttcatgtggagacgtgtaccatccgtgaggcccttcgattcagcgcagcactacgccaaccccaatctgtgtcaatggaggaaaaatataattttgttgaggaggtgattcagttgctgggaatgcagaatttcgcagaagcagttattggaagtcccggtgatggcttaaacatggaacaaaggaaactgctcagcattggagttgagcttgctgccaagcctcaactattgatctttcttgacgagcctaccagtggtttggattcacgaagttcgtgggctatctgcgcgttcatgaggaaacttgcggaccatggccagcctgtcctcgccacaatccaccaaccaagtgccgttttattcgagcaatttgatcgtttgctgtttcttgccaaaggcggaagaactgtttattttggagatatcggtaaacaggctcggacggttctagaatatctcgaggataaaggagctcgtcactgtggcccaactgaaaatgtgagttcttcggctcctgacatacttgaaatttgctgatgccatctcttctagcccgctgaatacatgctcgaggtcattggagggggcacccaagggcagtctacgtccatcgactgggttcaggcatggaaaaggagcactgaatacaacaaacttcttggggagctcgacattctcgcctcatcaccatccaacggtgtgtctgctgacccctacatggtcggcgaatttgcaatgcctcttttagttcaattctaccatgtcatgaaacgcgaccttcaacaatattatcgccaacccgaatatattttggctaagtttggcgcgggtgttttttgcggtgtttttatcggcttctccttctggaagtctgataattcaagccaaggctttcagaacgttctgttcagtttgttcctcttgtgcacaatattctccacgctcgtcaaccagtatgcctttgccccaagcttgatgctaacatctgacgatactgactgcaagcagaatcatgccgaagtttctctctcgacgaacgctatatgagctacgagagagaccagctagaacttactcatggaaggtgtttattctgtgtcagatcctcgttgaactaccgtggcaaaccttgttggggatatgtacctgggcctcattttacttttcggtttacggcagcggccaaagctcccagcggcaggggctagttcttctgttcaccgtacagttcttcatatttgcatcaacctttgcccaacttgtagttgctgcagtccccagtgtggttctagggagcatgctggctacattcacatttctcctgtgcctcttgttcaacggcatcatgcagccacctagcgcattgccgcggttctggatttttatgaatcgtgtttcgcctctcacctattacgtgggtggcatcagtgccactgcattgcatggtcgtccgatccactgctctaatcgagagctgagagtctttgacccaccacaggggcagaattgcggtcaatatctggcggaatatctcaaaacagcacaaggaacgctctccaacccgctttctaccgatcagtgtcaatattgcccacttcgggtagcagatcagtatcttgctgcccgggatatctcctgggatgaccgatggagaaactttggaattttctgggtgtatatcatcttcaacgtcattggtgctgttttactctattatctgtttcgagttctaccctatataaggaggaaccgcacccagaaatctcgaaactgaccttctgatatcggtactccactttcctcttcaccactcttctcacccaactttcatttgttttcatttttctctcgatccttttgtcgtttttctattttctcttataatatctttgtgtgaaaattccagtttaatgccgtctcacttggatgtttgttcagttaggaagtcaagggtgccgtacttcttggcacggggacgacgggagttacgtaatgggcggataaaccaataatccgcctcgctgtagctactggatgagcagtgcgtaaacaagaagcgcctggtatagataccgaataagaagacacttcgtttatacgaaggcgacggaaaatcgtcgcagcgcataacaaaaaccagtatctctgtttaaggcccggcgggggccatatcccagtctgaaattgttcatcgcatatttacatgtatcgggacattcaggttttctgtattttcaattcccagagataccaaatacaagatgtacccacacatgtatttaatcgggacgggacgatcctttcttggcgttttggtatcccggtacattctatacatacgcgaactgatgcagattacaattattcaactgtctctatcttgcaggatatgcaaggcttgatcgtcagtatcctccacaaatatgtctataggtagtcgctattggatgtgactgtgatactagtgacgttacttcagcattacatcggcagctatcgttacaaatggaggtaaatactagaggcgggatgggatgcaaggagagattaggttaaaataattcttaaaattgtaatgcttatctggtatacaggtaaaacggaatcagtcactgcctatctcatgcaatggagtcctgtgcgatctgccaccgaaccacagcgccagcctctctctgcaagggctaacagtgcattgtgacacatatttcgttagtatgctaagcggaaaatatttctatgttgtagagtatgcgctcatgttgggggagctgacatacagctactggcccaagcctgcgtctgcaatgcgcaatgcgcaatgttttactcgttaccaagctagggttatgaacccgcattatattttacaaccttttcatatatacaatctccgagtgtatcatgagtaggtagcatggttatcagtcttctgtgcatttaaatttatgaccaaagctagttcttctcccattccaagtgttctttcacaatggctgtcgacaagttaccattattggccaagttggaacctgtgagcctgatcggcttggtccttctatcggggctattttttttattgacagcaacacgaaagtccgacctccctcttgtgaacggaaagcgaccctttgagtttggaattgccaaagcccgccaacgatatctgaagaacgcccatagcctaattacggctggtctagagaaggtatgtgattcaattctcatctgggtacataattggggttactaatgcgtaggtctaggctggtgcatttcggatcgtgacagaaaatggcactagaactatcttgtcgcctaaatatgctgatgatattcgaagccaccgtgatctgagcttgagtgctgctttagttaaggaacatcacgtcaatatcgcagggttcgacgcagtcaaggtcactgtgacatctgatatcattcaagacactgtccgaacgaagctcactcagaatctctgtacgacatggaaattcttcattggcaataagagttgctaatacaaacagtgaatattacggagcccatgtcagaggaagctactattttgttgaaggcacagtggacggacagtaccggtaaatgcttctggatatgatatcaatcagacacaactgacttatttcattagagtggcatgatgttgcgctcagacccaagactctaggcatagtcgcccagctatcctctagagtatttttgggtgacaaagtttgccgtaatcccgactggctacgtctcactgtcaactacactattgactctttgatggctgctgctgaacttcgactctggcctgagatgttgcgcccaatcgcggctaagtttttacctaaatgcaagaagattcgcaagcagcttgaggaggcccgcaacatcattcaacctgttattgacgagcgccgactggcccagcaggcggcaattaagcaggggaagccccaggagcgctaccatgatgcgatccagtggctcgcagagaataccaaagaccgcactttcgaacctgccgcaatgcaattggcactctcaactgcagctatccacacaacgactgacctgcttacgcagactatccttgatctttgtggacgagaagaacttgtccaagaactgcgggaagagattatttccgtgttcaaagatggcagttgggataagaccacaatgtacaagctcaaactgatggacagtgtgatcaaggagtctcagcgagtcaagcccatggcgatcggtaaggaactattcatctcattttaaaacagcccaggctaaccaacgatggtgaatagctaaaatggcacgttgcgccgaggaggatgtcaagctttccgacgggactattatcccgaggggtgagataattcttgtttcctgcagtaaaatgtgggacgcgaatgtgtaccccgatcccaacacttttgatccccatcgattcctgaagctacgccaacagggctcagaccaagagagctttgctcaactggtttctccctcccccgagcatatgggattcggctttggaaaacacgcttgccctggaagattcttcgctgccgccgagctcaaagtcgctttatgtcatatcatcatgaagtacgactttaaggtggcagagggatgtaacccacaggtgttgaaatctggtatgagacttgcggcggacccatttgccagaattgctattagaagaaggcaagaagagatctctttctgagctcttcccaatttccagctctggccgtagttggctacgagttccggtcttttgacacttgatctagcccattattcaacatgcatgtgtattttttcctgcaaactccatgtttcttactttatcaacggagccaaagtccacaaataatagactgaataacagaataaatctaaattaccagattgtactttgcatgaccggaccttgtggagatggtgagtgaataatagcttttctcggagattaaacacaattttcaggatctgctttagtattttaatcataaatactttattcaggggatatagatgaaaatgatatatatcaagttacaaacatagatggagctgccagccagtggctgacaaatacgacatgctggttgttcttatccagtccgtctacatatatcccatagttactagtctgccatttagcatagcatattaatcacctatcaatctcctcctacctatttacggactatgaaataggctgaactaccggacctgtgtgctaggggttacgaatcttggattgagaaagacgagctcgtactatgggtaaatcattaaatattatcctatcgaagagctcaacggctagatgacaatgaatgagatagaagcccgaattgccgcagcctgatcaagggagcccattactcctgagcgcgcttccattctgcgtcaaggttgttgccaattgcgttaatggcctcctcctcgagctcacggtgagagagtccggtacgcttggagaccttagattccgactcttcacgcgacatttccactatgatcgaacattgtcagtcatctatctagtatctaagaatgtgaggaagcataccgtgtaaataaacagcggctttcttgccagtgtacattgcatgcgggacattggtgctcccatcgctgttcgcatcgcctatggcaaagacaccagactcgctggtacgcatcgcgctagtaacattgatcttattatcaaccaaggtcaggtgcatcttggctggaagtgtcgaagtctggacagttgggaagttgacaatcaatgcattccgctcgacaggctcgccggtagtgaagtgaaggcgaaacttgtcaaactgctcaccgtcctcgcccctgccatcgccgccatcctgcaggcgctcaatggaagagattgtgcggttgtcgatggtagtgttccaagcggcaagttgttccttccagtcttcgacctttgccgttgcccgggcttcgccatccgcggtctgcgagccgttcacaaacgcgatgatatcgctatacagagtgtgggtttccaacacattacccagcatatcggtgatatcaccgatcattccaaagggctggtccctgtgctcgtagccatcgcaccacggacaccagaagataccgtgaccccatcccgcctgaaggccaggagtcgcgggtagaacgtcacggacaccggtaccgagcacaattttacgggcagtgtagttcttgtctttggtggtcactgtaaaggcagagaaatccccctgtgggaaaggaacgatggaatccacggtttcattggtaaagtgagcagttggatacttctcgatctgcgcgcgagctagacctctgaaagtagcagggggtgtacctgaggggaatgagatattaggtaccaaacattgtgttggcatagaattagggcgcaatctcaccatcgtttccaatgacatcgtgcatttccctggtcggggcattgcggtactcctggctatcaatcaagagagctgttcggcggacacgagagacaccgctgagtgcactcagacccgcaggaccaccgccgaccacgatgacatcgtaatcggtcttaggcacttccacagcagtggcacatgccaccaaggagacaaaagcggacgcgaatgttgctttgatgaggaccatggtgaaatatacgcgactgatgagctatcctaagaccgcacggcagcagcaggaaggccatttataggcgtcccaattttacccacaatgttttatggcccaaacatgtacacatctgtggggacactagtcgacttcgtgcatcttggattgaggtggctgaagctgaagagatcgtcgggatcaacaagatcgtcagggattcacaaagatcttgttcccttgtgtatatgatcgctgatcccaagctggctgtatggcgagaaaataatactaactggcaatttacggaaggaatgtgctgtagagaagaactgtagacctcctccgtatgcttggtagacttagggcataaccttgccaatactcgatgagcactagcgctattagctgcgggcgctagtgtatcaaccggcgatctcattggcttggcgggtccgctagttcttggcggcatcggccctgaatatggacttccctcgacttccctcggcacttgaagaagtgacccttgctttctacctttcattcgaaactctagagacaagcttgggattacatttagaatgcgttatattacagataattttgataagtagcaggtatgggaggaaatatgcctgtgctacattactttgagtggaatgaacgtgaagggaaatcagttcttgtcaggtatgtagtgttgtaacatcaaccttcgagttcaccacaataactgcgtaggtaaaatatagaggaatggatacaataatgcataattgagcttggccactacttaggcctaggccttataaatccatgtccgatttcacaaaatttaacaagcctgcaaatggaatgaggcaataaactaattttcgagtccaatatttttgctgctgggattgacgaaacatcgaataaccaacccgttggcccttgcatttcagaaggaagcagcaacaggatgtaagggtacaatgcttacaatgcttgcaggtgcattggtgggaggtcgagtaaacacagcacattggtgtacttctaattctcaattttaggatactcggaaattcacaacatatcaagctttatgaacttaacggccatccgtggatatcagtgatggcaagaagtcacgagtaggatgaatagtagaatatgcaaaatgggatatcacaaaaagcagaaatctcccggtctataagcaccgatgccaaacgcctcaatctatctaacagagtaaactagctttccacatctccagttctgacatcataattaaacatcttcctggtcgtcaagtaacaataccttcagcttctccaatttatcttcacagtgcacttccatctgcatcaccacgtcaacggcatcctttctggtgataagcagctgcgataccagccaaaaattatacccattcctatagaaccccattgacgcccattcggcacttgttattctattacgcagtgcgatccagtaatcacgccagcgggatagagcagtccggatagcaacgaggatggaatcttcaggaatagtggtgacaccgacgcttttcccgcgattcttgaagtggcccctgcatataaaagaaccgagaaatgtcatgtgggtgttaataaatgagaataaaactaaacagggagtcagccagtgcaagcaacaagaataaagctctctgagacaaggacatactatgaatcaagataaacatgtctaaagcagtgaggtccattgggttagattcgggtgcctcgtcaaacaggttcttaaatgcctccgaaagcgtaaagccgcgtgaaaagcgaaagtttgtctccgcgaacgggtgctcggagaagaaaagcaattcatcacagggcagatcgcattccatttcagtgtgtgtcaggcgacacgggtagttttgaaaaaagaagaaggcgcaatcgagcagcgaaatcatagaaatagtcctgtcgaaattagtaaggcggacatgaaaagataatactggaagataagcacctaatccgacactccttttggatccacaagtgctccaggacctggtcatcaggaaggtgacgggatttgacaagtccaattcgtcgagcaaccttaacaacctcaccgaatcgattctccattgcgcggtttcgagataaacggttccccgcccagtattggacaatggtgatgataaacccggcctgaaaattctggaaccattcccaatcactgttttcctcatcgtagcaccggccacccgagagcatggctctgatttcggtctccgccgagaatacatcattcgcaaagatgaatagctctgcaagatccagcactctcttagcgatgtatacctccctctggtcactactgtacatcgcgcccataaagactaccgcggctaagagcggcaggggaactgtctccgggtcgaaggatataggaagcattgcacagctaggctgccagtatttgaaatagagcatgatgtattttcgtatgcgcgtggtggtcagtagaaaattgagattcgcagatagttcctcctgcgctttagcatcaagcgggatctgccatgcttgtgtcaatattaaatgaattaatgtcgtcgcgaacggtcgctccggttcgaagataggtggatctccgggaaatgtagtgggatgctgccctggacggatggcggatcggtagttcagttcaccagtatgataggaattttccgtgggcttctgtccatcaccaaaagggccgtggaaaaagtccaggaatgtatcttggaagaactgcggcgcgacagggtcgcaatcgatgaatccagagccgtattccgaccgagcggtatcgatgttatatggaagccctatgccctgcaattcctctaggccatttgtattatgataattgagactgcgtgtacgatcactgtgtgggggaagccggaagttttccgtgaagctgtcggtgccaccattaagtaagaacttgatcgatcctcggtcggatgatggctcttcacagatttcgggtttctccggtatttctgtgtgatttgcatgagtcttccattataaccgaatttatcaaggcttgttgtacctttttcaatccctagacggctcgagccagccgtccgctcgttgttgcatatcaagtttctcttctgacacgatccgcaaggacttcggccatcgcatcgcagtttcatcgaggtacactattcgagcagaataaagttagtacatatgactgggtttcataacgtctagttgcgactaaccgattgacaagcatgtcgccgtctacccctctgacctgtctctggaatttcacgatccccgcgcctggcgcagtcggtataatggacgcgcagattgtcactaattccaagtgttagattgccgagttgccattatagattgtctcggcttgtctaaccagcgcgcgaacgaatcattgcaaaatacgcaggaatagggtttctggccggagtctgtggaggttcagtatgttggatagctgcagtacggggcatacatacggcgcaaatgatggcgtttgaggtgatcaattcgcgtgaacgcacgctgacaaacgtcacagcggaagtgcttgtctgtcggcttcatggtggaccaccggggaggaggggaatatccggggtaaagaagagagaacgaggctgcacgggaaagggtgaggtatcggtattacattgatgtctggagataagaggtatcctttgagccttgataacgctaatagatacttgataatattaccggtcgagtatggtatggtcagctcctgatcttcatagcaaataattcttattctacctcatgttagcattctgatccaaatcactccgtaaatattcttatttgcatgaatagttttgatatataagatcatgaagcccaagcccgtccaatcgtggatgaaaccaaagtatcagaagagataggggtagataggtattgtttatcgtcttgacaaatgccctccatcacgtacaacataggcgctgtttgatgatagcagatgctttctgaaggcatcttttttgatgcctttttgatgttctttctgattactttcctatatggcaactagagcaaaaacaatagaaacacgacaagggcaatcttgtcatgatcgtatgtgatgctacaagggatataaaattgaacaccttttgttgagaattcataataggctaaataataaatcattctagagactagaactagccgtgagcgctaagagaaagctgctacgataggaaaggaaggacccaaagaaatatatagcaacaaccttgaatcatttacggtgatttatttcaggacacaaatacggaggagtcctccgagtcttggccttgatcatatcgtagcagtctctccacctcacaatagaacggctagccctattacagacgacctagatcaccttgtatcggattcaggaattatgcatgaaatacattaaattttgtagagtgcttggggtactttgttccgtatgatacttttgatttgagatcctcaagtcatgaatatttcgatcgtataagtcatgccccttcatgtttcagattctttcatcagtcaaagtcaaattttgaaaaaaacctgtcaggctcaagtctttgaggtgtagaaatatcttttaatggaacaaagaggcctgagtgtcccgaggggtgcgtgacagcatgcatgctagccttctaaggttgactttcctccccgttagcatggaagttctcaagaccgtcaatatttatgagagggaaacattcatatttgatagattatactgcaccttcaatagtgagatcaccctttgcatgtaggcagttgatgtacataccaacttactacccactttgagactcttcctatcaaaagactgtggagtgtgttcagcccaaatgattctcaatatatactacgtacgcatccccgtccgagaccgggctttgaatttgagtttctttgtcttctaacctagtccttctcaccctcgtccccgtcatcttctcatactgtaaaaattccgaatcactagcttccaccgtacatattgtggtgacagatcaccaacccccccccctgtacaatgtttgtgagccagctggcctggccactgatgctagctttggggaccatgacagtggctacagaagcatcgacggcaacttcaacctcctcctcgaccggtgtcgcgacccatacgattcaggtgggacctaagtcaaatccacatcaatttgttccaaccaacataacggccaacgtggatgacattgtcatctttgaattttacccaacaaaccattctgtcgtaaaggcagattatctcgctccttgtgtaccagcaagcggaaatgtcttttattcgggagccttcgtaaatttcaacgagaacgatggacaacttgttgggccagtgagcataataaattggaattgcatgtttaaagcagtgtggctaatatatgcaatgtagcctccgacttggtccttacgagtcaatgatactcaggtacagtatctagaccaaacatatgcccacaaccttggacggagactaacaatggctccatgtagcccacttttttctattgcactgcaatagattcatgcatcaagaatggaatggtcggagtgatcaacgcggtatgactcttggtttcttccgagcatggattcaggctgactatatcaaacctacagaacacaacccagtcatgggaaacacaacccagtcatgggaaacacaacacgaaatagccctgacgtacccttatatgctagtgccaggccagtccatgcccgcagaaggcgacggtagcagttccagcagcgacaatagctcttcttctggcggtaagcatgggcttagcacgggggctattgcaggtatttctgttgccggtgtggtcttcgtgagcatattggtggcactgttcttcgttttaggccgcaaccgcgtatactcgcagtgggtatcctcggaggatggacgcacggaaagaaccgcacgctgggcactgttcaaccacggcgagctatacaacaacgggaaaagcgaagcggggagtagtgtcccaactaacaacctagcccctgtcgatataaccgccgtctctagtcctgatcccaatgtgtgcacattgtcacctcgggcacgagttacctccggtcccggttccctacctatgcagcagggacattggagctggaatgagcctcctccgcgtgcccgtgcaagcgcgatggccacagagctagagggccatccaattatctgggaggcaccaggcagtactccggagtatcggtggtgaacaggttgaagcgagcctcgtggagtcttgtaataagcgagggttatggtgttggcttcaattatttccctttcatgcgcaaatgggtctctgcctttcttatatgttatatcaatacctgtgatttattgcttgtaatatataattccttttgaaggcgtcatttaccgtctttgtggataacgatatttaccagagtcctatctacagtttacttagtgtctgtgttttgtcgacatgactcatctgcacgtggtcggcgagtgatttctgcatgaacattatatgaaggttagatcgtgagggttgcgtctccatgtagtataggttcagtggaaggaatatcgagatgcgctaaatagacgataatcgtaataaaaccgaccataacacagttccgaccgcgttaaaggccttagagcgcgtaacatacgtatcgagttcgatcgagattacggtattattggttagccgacttcccacgcgtcgaaaatttatctcccaagtggattgcaccttcataaaccatcatgtccacaccatcaagacgttcagctttgggaatctcggggacccagaagcaagctcttcgtatttgggcacaaagtcaaaaccctcgtccatcacaatcgcaatgttctgcttggttcgaacgaacctatggacggaacctctcccaatcgaccatctcaacaatcctctctaaaaagtttgatcacctcgatgctggtccagcatctaccttaagacgtcaattggcaccgcaatggcctctcttagagacaccactttgtgagtggcttgcgagccaagaagcgggcctaatgccgccggccgatactattattgctaaagcacgcgaaatctggaatcaaattccggaataccagaccctggcacttcctcactttagtaatgggtggttgaacagattcaagaaacgatatgctgctcaacttcatgatcgccaagatggcgtgccctcacccacaccccaaaatggtcgcaaagaaacgagagcactgaaaacgctatgtggtgaattcccggaagatgatatttacaacatggatgagaccggacttttctggcgaaagcctccatttggcgcttcccccgctcagaaccaattgacaacaaacagggaaaattcccgcatctgcattatgctctgtacaaacagcactgggtcagatcggttacccctttgggtcatcggacatacgcctatgccagaggcacttcaaagggcgaatctcaaagccatggactgccattggcgatatcatcgacaggcttggctaacgcagtcgatcatgcaagaatggctgctctttttttacgacaatataggagagcgcagagttttgcttctactggataatcatccagaccaccaagcagccgtcgaggctactccgccgcctccgaatgtgcatattcaactgtttcctactcaaactcgcacctcggatgagcaacagccgatcaacttgggaatttcccagactcttaaacattactatcgcaggcaatggcttgcgtacattgtggcgggtagagaattgccccaaaacccggtccacatgatgagtctttatcacactatatcctgggccacccggagctggcgtcacgatgtcgcgaacgcaattatttacagggccttccggaggagcagtctaatggacccgcagattgagtttatcactgccccaaaatcacccgatttgacaagtctttatgggaccgccacgcgaaacaatcctgacggtcgaacggttatcagcctcgaaaactttattcaccccgtggatgaggattttgagggcggattaaacgttgccggatttgtcgttgagggtgaacctaccttgcaggaactagatgacgccatcgtgtccatcccgccggagcaacttgtacctcctgctgtggatgcagtcattgggatacagacggccatccggtacttggtacatcagccttggatcactgcgatggaccttcagggtctcgagaggatagagagaatgatcaatcgtctcgctattgaggagcgacgacaagcacacgttggtggtttcgattgaagaagcgactaaggacggtgacagtcgtcctggcagttagtgccttcatctcgacaattaatcaacctgagctatgaaatcgtgggttttttcttactcgggtgaaagctctcagaggaaggaaagttacatctcatatatgtcctgtgcgttatgaacatattgcagagcctggtacaggccgagctccacacagttgacctttatgagtgcccaatatctgtagttaatagcagggctacgtaatttcaagcgcagcaccagaactgatgttagagaataatagctcactaccaccgggcttacccagggtctagtgtaccatctcatacattgatattccgaacaaaggacacctgattcatccaccggactccacgctcgagccttattcgagaattagaaggtaatattatcagcctgcagcattgactggctcgtttttttaaattgttggaatatattatgctgtcttaagatataatggatgtccaaagctcccgtatcaagacctaaaccgtccttgggatgcagaataccaatcaattcttgaggtttttctattttaagctcactccaatgattatatgaatatcagatttcaagttttctgagccgaaatagaagcatatcaactccagatacactgttgtgtctatttggctctttgtttattccacactttctatttaaagcaaaggaggatccgttatgttgttgattttggcctagggtcgatccgtcaatctcgcgttcttggatccgtcggcgctttttgcaggattctctcaagttcacgagtgtccaggagttcataatatcaaagatgagcaggtcaactggaaatgatccccccagggtctccatcaaggcaatcaaagcacaaatcaggcattgcatccagtcgttgaaagaccttacagtaagttatcttgggaggaaagtgtcaagcaaggcagactgctgacttttgatagcattccataatgcgaggccgcggcgatgatactcatgggttcacgatgctatggcccagaaagagcggttccgatgtcgatgtcgatgtcacgatcggttgcgtggacgccggatcctacaaacaactttcgaaggcggccaaatgtgccaaagaaaagagggtcgtaggggggatcaatgaaaatgataggtgaattgttgggagtggaatgatagggcagcccgaaggcgcacagtggtgactaagagcttgcaaagagaaattgaagacgtgacagggacatcgtcgctgtctgtcattttgaagagtaaccaagtgggagccggaccaacatggtgctttgatactttcgggttattgactagaaggttgcgaccattaggtccgtactcgccaaggaaatatgatgtgatagacattatcatttacctttcggtgcccaatgtaccagaaaaaggccaacaagagaaacctacctacatgcagtgaagtaatttggagtcggacctaatagctgagggttgatgtttggctcttcgattggtcgggttcaatcacagattggcgcgcggctgctcacaacacctgataggttggaattgtgtgacggaggatgatgtgcaggagtataccagggtgtagatagaaaacaagtgtccaacacatgaatcgccgaagggaatcgaattgaacaagaaagaaagtactattcaaaatgatatcatatataaaacaggctccgtaacggggaatcgcttttgtgtttcagatagggtccgagaccaaaaaaaaagaaaaccaaaggaaatattttactctacagcatcagtgatacagcccaggctggcgtcctggacgtttctggcatatttacccagagtaccacgcatggtaagaccggtctcagggaggtttccagcagccttgcgggcttcccacttctctttgcggtcagcaaactcagcatcggagagttcaacatcaagaaggcgcttgttggcatcgatggtgatgatgtcaccatcatttacaagaccgatgggaccaccgacggcagcctcggggacaatgtgaccgatcaagaaaccgtgagaaccaccggagaaacgaccgtcagtgatgagagcacaggagtttccaagaccatagcccatgagggcactagagggcttgagcatttctataagaatgttagcattatagtcggagatcaggtagatttgttgcacataccaggcattccagggccacccttaggaccgcagtagcgaatgacaacaacggtcttctcctccttcttgatttccccacgctccagagcggcgatgaagtcatcttcactatcgaacacccgggcctttcctgtgaaggacatgccctccttgccggtgatcttgccgacactaccaccgggggcgagagagccacggagaatctgaatgtgaccggtcttcttgatagggttggagaacgggcggatgatcttctggtcctcggggaagccagggagcttctccaggttctgggccatggtctcaccagtaacggtcataccagagccatcaataagaccctccttgaggagcagcttcaggagtgctggggtaccaccaacggcgaagagatcggccatgacgtacttgccagagggcttgagatcagccaggaagggaatgcggtcggacacagtctggaagtcatcaatggtgagcttgatgccgaccgagtcagcaatggcaatcaagtgcagcacagcgttggtagatccacccgtgatattgacaacaaccatggcgttctcaaaggcctgacgggtaagaatatcgcgagggcgaatgtcctcggcgagcagcttcttgatggcaccaccagcggcgagacactcaagatacttggcctgggagttggccgggttggaggatgaaccaggaagggtcatacccatggtctcaatagcggaagccatggtgttggcagtgtacataccaccacaagctccctcgccggggcaggcgtggcggatgacgtcaaagcgctggggctcggtgatctccttggtaaggaactgaccgtaggcttggaaagcagacacaatatcgatatcggcgttgttctgggtagcagcgcagccgggcttgatggttccaccgtaaaccatcaaactggggcggttgatacggcccatagccattagaacaccgggcatgttcttgtcacatccgggaatactgatattggcatcgtaccactgtccacccatcacggtctcaacggaatcggcaataaggtcacgactctgcaaagagtaacgcattccagaggtacccatactgattgcatcactgacaccgacagtgttgaattggaaaccaatcaagtcctgatcctggacaccctggcgaaccttgttgctcagatcgagcaaatgcatgttgcaagggttgccgttgaaccacactgacgaaattccgacctgggccttgttcatgtcctcctccttcaacccgactgcgtacagcattgcctgggaagcaccctgtgccttgggttgggtgatggtgctagagaccttgttgaggggtttatcattctggaaacgagggagagtggttgagagagaccgactaagaagagaaaagaagtcagtaaccggattgacgcgacacaattgaaccaacttacacagggttagacctggacaggctccgaagagcggcgggcacacgggcccgagtctgaggaagcatgacgaggatggatgagagtatccaaaaaccaccagatagagcgatacaatcggaagtctggagaagagagggggacaagaaataaaaagcggaagctcaagggagtgggtcggtcaatcggttcgacaatcaaatcggagagaggcgaaccctccccgccaattggatacgcgtcgttgtcagcccgttactaggggaatgcgcacatcaattgatatttattcgctatattaatgaacgagggaatgaaagaacaatataattaaaaaagaagcgacaggaatgggaagggaagaaaatggagagaggagagaagacggaggtttaagacacatgggcggcgtcgacggtgtggtgactccgagagtactactatcagatagaaaacctcatcaataaacgacaaaatatgtccagattctattctcatttactgcgcgaagagtgcctagtagcttctaggtaaaccgagtaccttctcgctcacataattcaagatcatctcccgactcacaggtgcgatacgaggcacgaaacaatcgcgcatatatcgttcgacatcgtactcaaccgcatatcccataccaccatgcgccagaactgcccgctcacacgccgtgaaagcagcctctgcagccaaatacttggcactgttacacgcgacaccaatttcatggaaaggcactgatccatcgttggtatcatagagacgtgctgcgtggtaggtagccagctttgccgcctccagtttcatgaaagcatcagccaatggatgcgccacaccctggttctgaccaattggccgtccaaagacaacacggtccttagcgtactccgaggctttttcaagggcggcatatccaagaccaagtgcttcaccggccaaaagacatctctctgcattcatgccgtggaggataatcttgaagccttggttctcctcgccaattaatgtatttgcaggaatcttataattatcaaagaagacctcgttggcatccacagcgcgtccacccatcttcttgatcttgcgcagatccaagccagggctatcacggtctagatcgatacaaaataaggagagaccctcgctggtcttcttaacttcttcgagaggtgtagttcgggcgagaaggatcatctttgaagccacttgcgcacaggtaatccagatcttctggccggtgaccgaatatccgtcagcggttttgctagccaaggttgtgagtttgagggtctcaaggccagtgtttggctcggtgacaccaaagcatgtgcgccatgtgccgttgataatattcgggatggttgtctctagttgttccttggtgccaaacttggccaatggctgtgtcgcatagacgttggcgtgaatggcctgagcaccagccatacctgcgccagactgtgtgatagtctgcatcatcattgtggcctcggagatacctgaacaaggtcagaaatctggatgagaataagaaatctgcgcaactgtacctagaccagcgcctccgagggattcgggcaaagcaatgccaagccatccatctttagccaatgctgcatggaattcctttggatctttctcttgttgatcacgctcctgccaatatgtatttgggaatttggaacaaatatgggagatcgcttcgcggactgtaagctgctcttccgtaaagccagtcatccccataatgtcgcgccgccctgaagtggaaaatgccgcgcgaccttgggggtatttgcctattcgacatagtcctcgcaaaagtgcaggcacttgcgaccgtagcgcgcgttgaaattgtagatacattttacgttgaaccttgggaggagcttctcggctcaaaacataccccgttcgcatatagccgactagcagtcttggcgttctcggcttcgattgaaagtcgacggggtttcttttgcacatattcgtgtcctattgacatgttgctatcaaacatggccaaaattcaagtagccgagccgaattactcgaaaagacagctgcatagaagaccagcgaaactaccattgagcgacaggctggactgaagtctcatctgcgaaagctactccgtacacgattagcgaaatgctcaaggagaagtgaatatcctcaacaacacttgagaatacgatgaaatcttcagaacttaaatatattcgtgctttgagagaagttaagcacagtagcattcatcgttcagccacgtcctgttcagccactctatcgcttgcatccggactctgctctttcaacaattcgaactttcgaacgacttgaagagtagcataataactgaacggtaaagctatgaaccacagaccgaggttgatactcgccgttgcgatcaacgctgttggtacagcctgcacgccaaatccgactgcaacggcagcagtttcgatcccccgaagcaatgagctgtatcgaatttgatcacctggtgagtccgacaaatttccgatacaccagtaaatataattctcaaccaagccaagactgatgcgctcaaacagatacaggccaaacccacgaccgaaggtgcgttgatcactccagtccaacacggggtgggtgtgtcggtactcgttctggataatgaccgcccagatccatgtcgcagtgttcatgagtgcaataacgatgaacgtgacaatcgctctatgcttccgatttttcatccaaggcaggtccaccaatgagccacctaaccaagtcgccatcgttcccacaaccgccgacatgaagcctccgagcgcacgcgcgcggactgtgaaataggtcgcgagatatgtgccagggtatgcttggatccaaccaaaataccagaataatgggacaaggagcaagatcgacttactccttgccagccgccacatcgcactgagctcttcacgccagtggatgccgcggggggcctcgatacgcgttccatcatctctttgcactttctcgggatttgacaagagagggccaatgaccagtccaagacactggatggcgataaaagcgagatacgtctggtacccaacctggccgcgtttatcgacggtgtggtttatgcctaaagagaccgcaccaccaatgatgttgccgaaattgcggaacgtgaaccacgttgcaatgtagcgaccacgtttgtgatgctcagggtatcctgtggcgacagcaccctcaacgctccaaaagaaacccgcgctgatgccgcaagtgacacagccgagatacacaagccatgttgcaccagtgcgattgttcaaatacaatcccgctgcgtacaatggatatccaagtgaccccagagtcagggtccagcgaaagccgatagcgtttgtgatgaatggaccggcgaaacaggtcaatgtcatgaaggcgaatagtaaggcgttggccgcgttgaccaggtctgggctctgggatccgcccacgcccaaaccattcattgcagtccatatacctggcgcgcagaatgcacataatcctacgaccaggatttgaaaaagtgtactgtaaaagaacttgggacgaggtggtgggtgttcatcttgactttccacggtcgttgacacattggctttgtcttcggaatgtactgatgcagacatgattacagcctgggattgcagctgagtaaatcactgcaaatatgatccctgtcatacacagggcctagtaagtccattttatatgatagactcattgtatagcccgtttattggcacgatgcctagataagcacgcaaaatcataggcgcatggcataaccacaatcccgctcggcaattgacgatgaggacataagagcttgaaaggtgtcttctatcacgaatcatgtcaaggctaccccataatattccgctatcttggcagttgtgaggggtcgggctctcgactacaaatgcatggcatgcgcttggctgggtagctcaatctacgatattattttttacgtttgcaaaaaaaatggccacaactacagaagaactgcagattgagaaacttcagttggaggactctatcgtcacattcgagtccttcgacctcccagcttccaaccaacgtatcctcggacaaccacatcccaagaacacagttatcccgcttgcgctgcgacctgccaagtccgacgccaaggcaactctcgacgatttgatagagacagtcaagactctccaagaaaaagacggcatattgaccaagaagctcgcaagacatggcacgctgctgtttcgcaatctaccaatccacaacgcagaagacttcagcaaattcgcgcacgccttcggctataaaccccatgagattattggtattgtagtcgacagaccagttcttgcgccaaatgttgcgcctgccaatgaagcgcccaaggaggtcctgatatacaaccataacgagtcgccgcaagtcccacatgcgcccgagtatatctttttctacggacatcatgagccgtcgaaaggcggggaatcaccgatatcttcttcgttggaattattcaatcgcgcacagcaagagatccccgaattcatcgctgaactggcggaaaaaggaattctaagtaaagtgacataccgagtggagaagcagtacgaaggtggatccacactgaagcaggcctttggcaaggaagtccaagatcatgacgacgaagagacaaaacgacgcaaaatcgaggctcagatcgcgcgctatggcagagggcagcatactacgtgggactggactgatgacggtcttatcttgacgcatcggctacctgtcatccgaacacagcccggtacaaacctaccaactctctttaccgggttggcagcatattggaaacgtacacagttcgatgccgaggcgcgaaaaaacgtcacacagcagctctttggagatgggacacctattcctgaaaaatatcttgcacacctggcgaagatcacggatgagattcgggttctccatcgctggcagaaaggtgatgttttggtttatgataacgtcattgcacaacatggtagagaaccgtggcaaggcgagcagtctgatcgagtgattatggccagtttattcgatggtgaaagcgtgccgggcgcttatggatttggggattgggcgcaggttgtgcaagcacttgattgaaacccattttttttatgacaacacacacttcttactcaacatacttctgcttcatcttgactttcctgtcgtaatttactatggtgtccctgtagtaagatatagcttacggggaactaagtataccaccgggcataatcctcttattgccaggtagtattttagattagttgagtacggtgaacattgtatcaagttaccggccatatactatataccaatagtgaatttgaatcgcttacaagtggtaactctatgtacagtcactccgcaaaagtctccgtcaaatgagataagcgcccacttaactctttatagtaccaattcgaatccataggttttaatagattcgacacccttatttaaactagttttagtatttagaatgaatatgcctcagaggggttcttggaaccatgcttgattttgaaaaagcattgatcaggttagcaaacgcggttgcaaacttggtaaaaaagaaaaagatacctaggaaaacgcgcatgtagggctaactgtgacggagacttttgcggtagaactggaactactagaggttatacaaagccacaaccaactgatctgcacgtcttccgtagatccgatgaacctcgctcaacctggggagaggtttttccgagtttttctccctcaggaaatccaagactcctggtgtttcaacccagcaaaaacgttggcctcgctgtgtgatccagatggcggcctcgagtggactcccgaattccggcctagcaccattgtgcgatctgttcacgacagcctcaatggcatcctctggtctatcaaccaaagttcgccaccagaagaaatttgtctgatgaatctttttgtatagggcgtcgacttgggcatccagtcttgcgatttcggcagaaagatcggggctgctcataatacgacgattggccttgattgccgagcttcgggggatatttgctaggatttggtccagtacctcctgggggaccttcggcccaacagcttgtcgggcttgatgtagatccttgagatcgagcagaatcttgattttcaacagagtcaaagagagaaggaaagtgatggtgtctgtgaaatccataaacctagtctctatgtccagaaagtaatcaacatcctcaagaatatcggggttctcaataggtgttggtgctatttgcccaggagggtggtcttcagattcctcccagagataccaggacttgatgaatccataaacctcctcatcctcatcgagacgaatccagagagctgaaaccgtaccagccgcgtagtatttatcgggatagtagagcagcgtcagctttcacaatgcaaccgatgctctgatagaactcttcgtgtaagcatactccatgcactcctgcagattataaattgccatgaagtatttgttcttatcaggtgcgaattagctatccgtcaacaggaggggcacattggggagcgaggaatcgtgagggtgaggtcccagccgagcctcgatggcttttactgtcgcttgagtctgtcgaacatagttacagaactctttgtggtcttttcgatgttcgatctggtgatctttactgcaataagatagcaccctacaggcagtgcagattttcaggtcctgttctttatcgcagatcgcacatcccgaaggtaaagacgcctttgattgaacggtgtggaacaggaacttcggctgttggactgtgatcggagcttgcatcgtgtgtactcgaagaatctcacagccctaatggaagggaaaggggaaatggatcaataaaaaaaagcatatttgacagacagaatttggactaaaactggagtctggcagaataaattgacgcctgagttatacggccttaatcaggcagaatcaggtagaagcaggcagccctatatccaatccaaccaaacagtaattccctccagcacatcccggtacttcatgtaataagcctggcccaacatatgaagcttccgccgatcggtcttttttgatctagtacgtgggactctatcaattaggatatacaacccaggaacataatacttcggcaaggtctggcggaccgcgtcgctgagcgattgggtgagcgcatgcacagcgtgtctctcgctgatcggacggaactccatctcttcaactggaccgctttccatgttcatggggttatttgtcaagtataagaatacggcaagaatgggatcgccctggccgtcaatagctccaagaacgtcgacgacagcaaaatcaccggtggataagttccgccggaggacgtactccacttggccagcttcgacccgcgctccgtcgagtttgagcatactatctttccggcccattagctcgatcgtcccatcatggttgtaccgccctagatccccagagcgatataggcggtggcttggcctttcggggtggagccgggccatccagacgggaggcgtggagaggaagttctccgattttccagacacgtggtctagatatcccctagagagatgaggaccctcgatgaggagctcgcccacggctccgacgggcatcagctggtcaggattatcgggattgacgatccaaattgtaccggtagcagggcgaccgactactgacccacgacccatctgaagattgcggttataggcgcagagggaggctacctcacccataccgtattgattcactacctgtacgcggcccagccattttgccagtaccgcgtctgacactggctcaccaccaatacacatcatctccagggtggggacgcggtctggttccatatcgatggcaactgagggtgttatgaacattatgttcccctccaggtcgttcatgtcattcatgagggattccatcgtcagagatttagtaggaacacagcagcatccgccggcaatgagaggcgccaaaaagtcgttgttgctgatatcgaacgtgtatgaatcgaattggaacatccggctatgtggtcccatatccatgactcggatgtaatccgtcaatgccgaagcgtagctacggtgctcctgaatgattcccttcgggcttcctgtgctgccagatgtgaagagtacaacgcaagggtcggtgggcgtgacggtcgaacaagggactgatgtcaccagtggcaaactggaaacggaagcatcgctgacctcgaagagggtttcaatccggtcgccaaatcttcctttatatccttctgaggtgagcatgatctttatctgggtgcgctcgagaacagaggaaaggtatggtggtgggtcactgccatcaacgcagatgtacgcaccaccagccatgagaacagccagtctagccacaatggcccaggtggatttgtagaaggcacaagcgacatagatatttggtccaacgccttgtcccactagccaatgtgctaaccgagaagttaattcctcaagtcggcgatatgtcagatccccatcccaggagcgaactgcgggagcatcaggggttgtcttggcgtgctgtaaacaaagatcatgtaggagggaatcatgcgtagggccgatagctccagtgaatagggtaatctgttcacgatcttggggcgagcataattcaaggctaccgatggtttgtgtagaagagccatcaattgacgagagagcccggttgaagctgtgcaagaggcttgtagccattggcagtccaatatcagtgtttccaacatccaatcgggcatgtaacatatcgtcggaggtatggtgtatggaaagctggagaccggggaacgagtctacctccgttgactctctcgccggtgcgccgcaacagacctggaatccgtccacgcattgattagacagggtgcgctccgccggttgcttctggtagaatattgtcacattgaagccggaattctcgccgacttggtctgtatggacttcctccgtgacccccatatgggataatgggactaatgcttcaatactctcgcgaaacagatctcccacggtatcatgaggatctacgtggatctggacggtcggcttcgagtagccatgagccgcctcgcctatgtagcattgaccctttggatagtcctgaccaatgtatagggttgtcgagcagcaaaatgctctgattgtagtgatccaggccaattggagtagtcgctggatatgaatatccggatgttcttcctgggcggctaggggagggaggttgagggcatcggcgaggtgcaggagtcgccaaggacgtacctttagggtgaggttgaccctatcggtagaaacatcattgactgctaccttcaatggagcagtactgagctgggaaacaattgtgggttcaaacaggacaggagccatgatgaagatgaagatgaactgtagcaagtgtggagaaacaaatcattacattctagtattagggaaactctggcctaaatgtacggcctggacagggacgaggcatgcaggagatgtctcattgtgaacatgctctcttggcactactccctttgttgaacgaagtgggcaatcaataagacctcgttattgacgccacaggcatttactgcgcgaatcatagccatcggcatgtttggagtatgcaagatgttactcccagggtgatcaattcgtgctcacggagtgtttgctctaatgtgagagcttgtatttggatatgggctgcctgagcgagctagcagaacgggcaattcgagccggggtttttgtggcacactctgcgaataaaaatccaaatggtaagggtcaaaagagacaaacctagtctggccaatcgacttcgaagatcaccgttgatctgcagtgtattttggcactcagtcaaccctggagtagggagtagtacgaggagtcagctgcacatagagtcaatgtactcactccgtaagatattaggtgagagggaattgatttagcagatctaaacttgtctcatgaattatatttaattcatcaaatcaaaattccaactagaatatgaggacctgtgaaaaggaggccgaaaatgaccacccgtgactttggagggctggcgggcgcttcaccgctcactgtcgagtactggcgccgttagccatcatcttccgtgatgttttgcgttcaacggtcgtggtccacgcccaaaatggctccctttgcagtcccaggactaagtgaaattccactgatagtaaaagatctcatcaaggaataaactccagtatcagcctccttgaacttgtaataccaccgacaacgccgtcttggtccacttgccaatcacccatttccacccgttcagcccagctttctaaaactttgtgtagatatgagctacgcgaatccacaggggcaccgacagccctgcctgcgaaacaggtgtgagagcagagtcatcactgggagtagtagggtgctagagaggagaagtggaagtctgcattgctatctaggcctcgggagtgcttttatgccacatagccgcttagtcatcttgctctggaaacccccactgcattagttagttaacagctaactagttagtcattaactagtaaaagatctcaccaaggaataaaatattctctccaatgttctccagtatcagcctctttgaacttgtcaataccaccgacaacgccgtcttggtccacttgccaatcacccatttccacccgttcagcccagctttctaaaaccttgtgtagatatgagctacgcaaatcccaaggcaaataaccactatagccaccgcaaaggtcctcctggtaaagttgatcaggccgttcggttcccggaaacctagcacgtttgaatggaacacctcgagcaaacccattgctgccgatcaacttttaaacgggatcgaagcgacatcccatccagccccaatccatgcatatttaaaaatcaggttgtgaagttgggccgataaatgggggtcaaatgcagtgaatgacatggctgagatgtaggtctttctggacctcggggttatggtgggagatgtggaaagagaggagcggcatcagcctaacaggattggttcgtaccctttacattttgccatctcgtgaagataggtaggggccagggttactttcatagcgaaaattgttgttatattcggggcattgaaggagggttatgtgcagcgtatttgggcactaaaccgaaagagacaaatctaaccggatacataattcacaggtccgctgtgtagatgaaagaattgacaagtcccaatcaatcagacattctgcataatcccagggtgaacgccctcaaggatcgacgacagctcagcccatagtttctcacgggcttgacgcccctcttcactgcgcacaaaaggtgaaagcgcagtattctcgacatgtccatctgtcatatatgaaccgtggctttcgagtccagctgcaccgcccgccaccagcgttcgagatccaacctccgtggatcgcgccaataccattttcatcaatttgaactttaagccagcttcccgtccgagttgtgaatggcagaaaccaggattgatcatgttgatcactacctctgatccacgcacacggcccgccagttcctgcacaagtagcacctcgagtagcttcgataatgggtaccgctcgtccatcttggcttttgtttggtcactgacgaactccattggctgatcttccttccattctgggaaatccacccatgcgtgtacttcactcacaacaaaggtaagtcggggcgtgcgggatggattctttgttcgtgtggctttcagggttggcaggatgaggaggctgaggaatagagtgttgatgacattaaccgtgagagtttgctcatacccctcggcagtgctaaattgcgctgtggcaactgctgcattgagaatggctacatcgagctgggggagctttgaaatgcgctcgccaaaagcaaggaccgaggcgtgggaagccagatcgacctcccacacttcacagatgcttgggcggcctgtagatttttcaatgtcctcttttgcttcttttcctgcagtcacatttcggacgccaaggatcactcgtgctgcacctagtcgcgtgatgtgacgtgcagcttctagccctaagccgacattggcgccggtgatcagcaccgtttggtcggcgaaagactgtgttggatatgtaggagtaacgaagaattgtgagtaaaggaaagccatgatgagtggatatttcgattgaagattcttcaacgatgcaaaagggtacttaaatagcagtgggctaaataggcaacgaatggccaacgtcatggagggcttgcgatccggagattaccggggttaagctcgtccgctctaacatcctatctccatgacctcggcattcgctaaatcgatatccttatgaccgaatataggagagatcactatgtccgaacagaaaactacaactgatgaaataatgtggatttggctggacactttaggtatgaaggggtgtggtaagggtgaatgcttgcaacggatgtgaggcgagacattggtgttatgtgattgggtatgtccgcttctcttacccaacatgacttgaaagtctactctgaagaggttccctttcagaaaacatggggagcatataaacaacgacaatccaacaattccaaagtcgaaatgtctgtttatcccctagaacagaacgaatcaacagtgccctcaaggccaccagtgaagccaatgccatgctgaggataaaacaaagggatgaaacttcccagaacattggactccatattccccaaccgagcatgggtattgcaatggtccaccgcgccgcagtatcaccccagactagaggcacagttcgccgaccgcgtttagcatccccggcttgatcggacatgtcctgcaattggactgtagagaaaataattccgatgacgacaaggagccaccgacctgaccagccaagcgggtggagagggaggaaagagccgcccaatgccacttccatcgctcccgatgcgaaacaggtaaatcctagtccattgataatgttccgaatgactgggttcttgtctgcaccaccccagttattgtaccacacccctaaacatatcaaagccacagaatttcggactcccccggtgaatgcaaggctatatatcggggcaaatatacacaaactgatcataactcgcgtgccccactcgtgagaaacccgaccgccgggaaaggggcgccatggcttgttgagactgtcctcggcaatggctctttgaccccgttggttgttgatagcgaatagaattaagttgaccagaatccatgataatgtcgcgacagctcttccaatagactttggagagtcgctgatattctgcggaggaggcagagcccctgcaacatgtgggtcgtatttcgacgcggcccaagcgtttgtgattccgaaaatagtgtttggtatcacaatggttttaaaatcgctgaagagaaatagccagagggtatatgagtggtaccacagcgaagtcaatgctccttggacaatcatggcacaccgacccatgacggatgagtgttgatgtttcagtcaacgttgatggtatatgttatacctctggcgtgagtcgggcttttatatctgatcaggtggaatccaaggcttgaggccgcaattttgggaatcgagggaactacagaccgtcaaatgagagactaaaacgagaaatcgagcaccgtggcctttttgatgtctcgtacaaggccctgagtttattctaaccagaatatattgccacattagggtacctagatagatattcaacaaggctgggttgtggccatactctccgatggccgagaataaagagtgttgtccaacattgtgttttgcttctctttcaccctgacttttatgatgaaagagccctgattggagctactataggactcgtcccactttgaggctcgaaatagccattgctacagttccaaaatattctgttcgatcgatcatgatcatgctagcttcaggggcagttgcaattattgcggggctactggcccaccagcttgtctgtattcatggagaatggcatctaaaggggcctagggtcgttgttgttcatcttcttgccagtattctattatatgcaaccctttttgttggtcacggaagcactggagccagtttggttcggacaatatacttgacgatatgctatatctcatccctattcacaagcattgcagtataccgactcatgtttcatcgattgaaacactttccaggtccaagattggtcgcgttgactaaattatggcacgtttggcaatgccgtgactcgcgtgggcatctcgtcttgcaggcttggtacgaaaagtatggggagtttgtgcgtaccggtaagatatatcgcaacccaagtaggactcctggataacgttgaaattgaattttcaggtcccgccgaacttaccatattccaccccgaagtctacgaggccgtggatggccctgaaaatcgcaacacgcgttctgattggtacgaccttctatatccccagatatcctcgatctttacacgcgaccgacagcttcatcatgagcgtcgaaaaatgggggagcaagcactgagcagaaaaggtctggtgaactcaatggcttacaaaaagtcgaagactgacacaatcattcagcattgctccagtaccatcggcgggtgctagaaaaggtacgcacactaaaaagcctagttgctttggaagaatcatgccccgttctcatcaacgatctgatgtatttcttcgcttttgactcaatgggtgatttcgcctttagcgaagattttggtatgatgaggaacaagaggtggcattcatcgatagcgatgctgcgctcggcgctcacaatgttgggtccattcagtcctgcgatatggatcccgagattggggttcgcgtttattccttcgctgtggaaggtccggcactggtttcatatgctcgaattttgtgatcagtgcatggctcgacggatggaggtactggaaaccatacgagaaatctaacatctgactgacatggagctagaaaacactctccgatcacaatattgcgtcttggttcatcgaggaccatgtcaaacacggatcagatcccacgcgggcgcggtggttgagtggtgatactgcaacactagttgtagctggaaggtcagtatggttaggttatcatgaggcaatggactgataactacagcgataccaccgctccaagcctaacgcttgtcttctatttcctcgctcgctatcccatgcatgctgagaagatatacgaagagatccaaggagttgatagggagaacccagctgcattggccatgttgccacatttgacgggcactataaacgaagccatgcgattgcttccagcagtacttaccttcagctctcgaataactccaccggaaggactgatgatagatggcacctttatcccaggaaacaccaaaatatgtgcaccacgctatacaatcggtcgacgtgagaacccccttgtcatctcttcaatcggaaatactaaactgagcctcaagttgagacggcatatgtcaacccccatgaatttattcccgagaggtggtacagccaaccggagcttatcaaggataaaagggcatttgctccttttggtgtcggtaagctacaactccattgactggtgcggtcagatctcccatgtgccagttgcgttgcatgggaataataagaggctcgcattctgagtctttgtttcgacagggcgtacaagctgtgttggccgtcatttagctcttgcacagatccgacttgtaactgctgccttgatgtttcattatcgaatcaaatttgcacctggtgagaataatggcgaggctgtggaacgagatatgaaggatcaattgaccgcgcagcctggtgcttgtcggcttgtgtttcaaagtcgggtataggtaaggtgaaacaagaggatgtggaggtaatatggtaaatcatggctcttcattaatctggttcgacttctttgtaatgttacgtgagaagtgttgaactagatataacatgcaaaactcctgttttcactttctactcaggccggaatccccaggcaacgtggatgtcaaatgtgacataacaaccagattgaatatccgcataagccctctgctccagctcatcaatctgccacatgtgcagcgcacctggcgaccctctagcagaatgaaggcgcgcccacgcgaacatagccctcatcccatttgcagtcaagcgggtgcgtgtatcatacacgcgatccgcagaaactgcctcagtgtggacctctactagaccagcattgcgcatctcggtagccagtcgattccagccaagcttgaagcggggtctcatggcagtcatgaacgtaaatcccattgcactcgcagcgtcagtcgtagaagtagcgcttccggggaagtggcgaacgttagtaaagtcgcactcttcccactgcatagcaccgccaggctttagcagcttagcaagattgcgcacagttctcccccattcagacgctgtcaagccggcggcaatcagtcgaatgtgcacgatatcatactgtccgtagaggttgacgggaacatccttgcgcgcgtcgagaacgtgaagagtcacgttattagggagggttctggcgggtggatagagcgatgttgatatgtcaaagccgtgtaagattgcgtcgggccagtcatgggcgaggtagcgcaggaaggctgcagtgccggtggcgatgtcagccactcgcgcatgggggtgcattttatctcgaacggacgggtgcagcaggtagccgatgtttctgtttcagcaggagtcagtaaggtttgattttgggctgatttgcaacataggacttggcggatttgcttactcggtgaggagggcgaactgctcatcgagtctacccagtcgatgttagtattaaatgttttattggtgctggtgagctcttaccgttgcgcttcggtggaatctcgctgcatattctccgcgtatggatccatgaaaagagacattttggacagcgtactttggatcaaacggaaggtcggtgtctcggaacgtacaaataaagggaggatgcaggacgctgcagcggactgatgggaagagtgagatctcgatgtgaccaggttactctaatctttgcctcagaaagactgaaatttggtcttttactgcagtcgccagggtcgcacctgctttcgcagctgaacctctgctgatccgcgcattgcaggaagttgaggtcaaggttatcacgttgtacgaaatgaactctgcggtattcatggacgttttccatatctgacatctctgtatatgctgtcctctagattcaaccctaacagattagttgaaatgatggtatctcttgagtttagaaaatgattcctctcgacacttctgctaacagcccataccgccgaacaactttgctttatattgtcaaatattgtcattaattataattctttcaaatatgatccacttgaatcatcgctctccggttctgattgtttggagtgtgatattcttcttcgttgctgcagtagctgttgtacttcgacttgcctccacacatattcgacgtcgggggttgaagattcatgattaccttattttcttctcactggtaggtttgactggggattaggctattcagccggctaaggataatgctaggtgctactgaccggctatgtggtggatatgttgattggtaagttgatccgatcgactcgctatgcagcaaaaagagctaagatcttatatcaggagctattacctctggctatggcgggcatacggctactatggctgtagtgcaacccgggagagttggttagcgcattgaaggtacctcgtctccttgaacgtttatatgaggtatcgacctggttagattttctgggcatcagaatggatgtgggcaacctcgacagtctgttttaggctcgccatactccttttatatctggagatcttcccgggcaatcagaagttcttctggagtgcaaccggggtgggatgtcttgtcttcctatactgggtatcatcggtattgaccatcgcgttgctctgtcgcccggtcgcctacaactgggatcgcaccatcccagggagctgtggggatattttgaagatacagtatgcatctgcagggttcaatatgggaattgatttgggagttgtgttgctgccgctccctattgtttggcggctgcaaatgtcgagtcgcaaaaagactggtgtcactgcttctttcgcgataggcatcctgtaagccccccacaagctcactcttattctgtttcagttgctgaccgctagtagaacggccggtatcaatctgggccgcattattcagaccaagttgtgtccagctgacgacctaatctactgcctcagagactcctctatttttatcatggcagaaatgacggcaggaatcttggtggcttgtgttccaacatttgggcccttattgtttcgcaggcgaaacacacatccagcgtaaccacgcgatttgcccacaattgggtcaattagaatccgccgtcggcctgcgaaattcgattctctcctttctactctcgatcgcagtcactatgacgaagaacgagaccatacaaaggaattggagtatgtgggtgcgcccacagcacatgctgggactgggactgagaatgaagccccagagactggcattttagtaacacacgacctcgatgtgcatagtctgaatgttctgcctcgagtatctgagacttcgactgtttgaggagcagcgattttctcagagtggatgttcaagatgcaagttcccttttcctaagagatctgcagacctgccgacgagaatatgctccgtaatgcatgtccgatttgtaccacccttagatgagtccgagccgtttgtactggccaatttgtgagagtaaacaaaaatacatagttgaaagataaaccaattggatcaagcttttcctcaactgggagagtatggtcgtgaatttttttcttttccatcaggcaccaacacctgggcacgatataagactgtgagaccacgtgcggggaaaactccttgactttcttttgccccaactctctctctttcacaactcaccatgccttgcaagtcctttgtggttgtgctctgccatggctcttaccatactcctgccccgtaccaagctcttgttgatgccttaactgcgaagggcatcgaggctcattgtccccaacggcccacttgtgatctcagtcagcttaatattggcaaccctagcaaccctgattttgatcgcagggctcccccaggaggctatccactccccgcagatgatgcgacagagatcgggctgctgctagacaagttgattgcacagggaaagtcggtgctacttgcaggacactcttccggtggctgggttgctgctgaggctgcacagtctcatcgccaagctcctgtccgcctaagggaaggaaagactggtggtgtcattggaatcttctttatcggggcatttattgttccccaaggccaatcagtgaactcattctttcaacccccgggcggtaaagttgttgtgcctccgtttatgcaatttcatgtcggttgaccagtgaatgaatctttgtttgtaagtactgaccgttagtatagaaacacggtgtcaatggtcttggcaccatggtcgaccctgaagaatacctcttcaacgacctcgatagtgccactgcaaagaagtgggcatccacgttgacagcagctcctgtgatgaacagtccccttacccacaatccttatgacgtgctcccatgcgcctatgttgtgttagaaaaggaccgtacattaccaaaggagtaccaagaaggaatggcggcgagtcagagcaagccgttcacgatctaccatgcaccctgtggtcactcaccacacataagttggacaaatgagctcgctgcgaagatggaggaatttggaaaccaggttctagctgaaagaagcacgacagattaagtgaatttcagaaataaatctttcttgaaaatatacaaaagaggaaacatatgagttacactcgaatcccaaggtttgacgaataggaaggtcaagatatttgtgcaacgcgcgcgtcttcgctttctaatgcctttccactttctcgtttcttcctctctccgacgttgtcaactacttccccatctctctatccatccagccatggatacccctcgctatgtgttcggcgcacaaggattcggtgtcgcctggacagttgacaatgttgaccacttgatgaaaagcctcgcggaggctggaatccatcaattcgacaccgccgccttgtatcccgctaccaatcctggtgaatctgaggagctgctgggtaaaaagaagccagagaatgcagtcatcgacacaaagattctcttcatgggcgatgactctttgtccttcaacaacatgggagcctcgatcgaagccagtttggagcgactgcagatcaagcaggtgggtaaaaggcgcccacttactttgtgtgcaatgctaatacggctattactagattcacaccatctacgctcatgccccagaccgcaagaccccgatcccgcttcaggctgcttacttcgaccattactatcgtaagggctactttcagagattgggtctttcgaactacagtccgtccgcaatccgtgcctggatggaaatcgcggtagaggaaaacttcattatgccttccgtctatcaaggccagtacaacgtgttctgccgaggctacgaggatgaaatttttcccgtacttcgcgagttcggcattgccttcgaagcaacctcgccgttggcaggtggattcctcaccgggaagctttcctattgcccttcacccgaagagttagagggtacccgcttcgaggtcggtgagggcaacatgctcggtgcagtctaccgtatgtggtatgaccagcccgtctatcaccaagcgatgcgacgattggacaagattggtaaacggctaggaaccaccggggcccaatgcgccctgcgttggttgcttttccactccaacctgaaggatcccgaccgaattgtcatcggaccaagcaccttgaaccagcttcaagactatgtggacgcccagaaggccggaccacttccagctgacgcagcggccgagatcaatgcgctttggccggccctcaaggaagttgcggcgacgatcatcgagaagggatggtggtctctgtgattgatatgttgaacttgagggggataacgaccaaatttccaatggatcacgaggtattcatacgccgccaggctggtctacaaacatcttatcaagttaagccttatgctcacagacacatacaaactacatgcaatggtatctcctagtttttcacacgtattgctcctatgatatcattccctctggtaatttaagacctacacaatcgcccattctcacccaatctccaagcctcactacccacagccttaaaagagtagaacctattgtgaggatcatactttctcttgatctctagtaaactgtcatagttgtctccataaaatgcatgttgccaatccctttggtttggatctgcttcgttcaaatatgcaccacttccaggtgtcaggtcttctagcggtggcataaaaatatcggtaatgagctggtgacgagcgacattgctctcccagtcagtgtagtcgaacagcctggattgagattaacaaagacttgccctaaccctgaaagggaatgggaatgaattgcatacgctccaattacgacattcatcaacgcatctcgccaggttgggttgacactgttgtcgggatatgcaactcgagatgagttgaccataactcctgaaatgagaaccccggcgtttctttcgacaacattacggaatgtgttgacaagctcgcccaggttctgctcgactacagatcttggaatcaggcggccaccagcaagttgatcagttatgttgtctggtgggctcatcatctggtaggcgtcgtaatatgtcgggaaaccgttcacatagtatgctgttcatgctctgtcagtgttcgctccaactctgtatcgccttgtacttactgtgctgtatgttcttttgttcgaggaatgaaatcaaaggtctaaaaagggaattgaaaattgtcgctgatctgcccggaatggtagtaggcgtcattgacaatgtagtgttcattaaccaccaaacacttgcacccccagcatcccggaccgagggaagaatcgaaataaacatggcgacggctgcaaagaatgtatctcgcgatacacccttgtcggagaatgaaaggttacctgacgctgtcggcagttcagggtaggccttgctcgtcatcgacacaacaacaccattcgtccctccacctccgccggacagtgcccagtagagatccgaatagtgtgttggggatgcggtcactagcttcccatttgcaagaacaacctcccattccaggacttgatccgcggcgagtcccacatgggacaccaattggccatggccgccgccttgcgaatatcctccagccagcccaacggttggacagttcccgccgacgataacaagcccagctttataagcggcgtcgctggcttcgaaggattggaccccggctcccatcttcatagctttaccggaatattgtgacgagacgtaatctacgatggaaatatccttcatgtgatgcatccagatcgccagtcctccagctccagtggacttcccaagtaggtcatgtcctgtattacggatgacaaggcggatgttgtgacgagcagcaaaattaattgtcctctggacatttgcgggatctgtcacgttcacggcgtactcaacgtagttcccgatcgcgcaaggtgaagattttgacgagaagggattgcagcttaatttcgtgaatctggacgccataattgacgaggaactttcgtaatgcgttgctgggaatccccaattggactggatttgagcgcattgcgattggttgtacggggtgaacgaggcgatgtgacagacgctggcgattgggactgtcataattaacttgttgtccactgttctgttgaatcgtgttcatcgatgatcctcaggccagcagggatcgtgtggcatgcaacgacaggcaagggaacttgtgtgattcccgattgaaagaccacaagccacagttgcggcacgaaggacagctaggcagagccgcatacatgcaagagaagggttggccattgtgataatcggacttcggctaacttaatgtcactcgagtagcagattatatacaaagacatattctgcaaagcggaaaccagcctgtacgcactacatgtaagactttgatatacaccgaaaatatcacatcacttcggccctgcataggtagctgtgactgcaagtctgactctgagcctcgtgaggtagggcattagttgaaattccacggaacaaaacacttgctcatcttatatatgtcttgtctaagattggtgtaaccaggtatgtgcggagagagtgctaattttatcacgataaactcgaaaaattgggggctggcttattatctttgcatagtcaagtttactgcagcctcttgcgacctataccagcctttgcattgagttgtttgtcgatgaagtaaagggctatagatagatcagctcacttcggtgaaacacaagagataataagcgcttagtacagctattgaacgtagaaggactctattgaactgacactagaatctgaccatagaatgaatgtgaatgtgagatgagtgaaaggctcagggatgaatcctaatacgaaagatactattcatgttcgttgaccagggatatatatcactgtacgaagtacacgagcttgcaaaccccggatggtgcttttttttggagtgtttacacctgcgaatattaccataaaatatgtccattgcctacctttaggtcgttaactattggatgttgtagaaggctggaaaaaaaggtataccccgtgatctggcataaccacagctcgatcacgatgccaagccacgagtggccgataatcggccgcacacccgagcctaacgcacgtcacctcttctaggcgccatgggatcctcgtactctacaatatcggaggatgtcaaatctatccgaaatggaccttcagcctcccatgaagaaaaccaaatctattacccaagacactcagctgatgcggtcgagagcttcaacattctccgacaaaagttgccgtctgaactcgtcctggagattctagaattggcagagtattgggtgttatctgccaccttcagagcagacacagtgggttacgatgaaggcgactgtcgtgatcgaaccccatatttgacatcggagcccatccaaggcgagcgatttcccgttcgagagatcagaatcaacatctggagccatgatcagggatggagcagctatggtgaagatcatggcacatacagaaactcttggacctggttcgatcttggtattgaacgaccgccgggacgagatgatatctccaaagatgaagacctacgcctggcgacgaatgttcacgctagacgcgaaactatgcaccaccagattacgtaccggagggaccagaaattacgctggatgcaaaatcttcaagcaggtgatcggatttcgattataccacgggcgcgttttcatggctggcgcaataccgtggaaaaggcttctattgaggtttacaccagccctgttctgtgactatgtccctgcattatttcatattcgtcttgatttcaaagccattttgtatggtctactttatacataagtgaatgtgctcaactttcttcgatctttctgacatctatcgatgcgttcccgaagacagaatagcggccacttcctcataaacagaaaatacgatgccaccactcagaagtagccggcccaatcgcatggaactacccttccaaaatccccgaagcccatagtcccgaatcacgctccgggaggcttcaacaatgccagctccttcgacaccctgtgcacgtgtcttgatggtatcaaatggttgtgtagcgtacacagtaactattcctgccaaggcaccgatgccgaacgttgtgaacacatttggcttgatgcccttagccttcgtggcttctttgagcacgttatacgttcccatacgaactgcagaagtggccgattgcttcatcatcgtcgacacgagaccgcgataaagctcggtgataccatgcctttttaccagcacttgtattgcctgtatgctcgacttgaattgccgagcgccttttgcatcgtcgattctggggcgggatcggtcagctgaagctcttttaacatacaagtggataccaacaatgccgtcttgatcctctccgtcggtgttactgctagtacactctctacagcgccagcggtcattccagcgagcatcccccggccagccgagagaacgccacgatcatctgcaagagagttgcggattgtatcgtaggatacgaaccggaccgcggcctttgctgttgttccctacaaaatgtcattaatgtgacgtaaaatgccattggagacgaataaaccgacgatgacaagagttgagcatcctgtgtacagagcaccgacaccttcctgtctcgcaacttgtacgatgagacggagtggatttgatgtccgaataggaccgtcattcgacagttgaacacgtgtttttgaatactcaaatggatactgcggccgtcagttattgaactcttgtgtaaatcaagaaaccgaccgttatggccgcttccactccaccggcaattcctccggccacgagggacacccactggggcgtgtaaagctagactaggtcagttaaagtactcaattgacgctcaactgaatgaattaccctcgtctgttgtgggccaggttctgatttatcgggcgcagacatggtatgacagtgacagcttgcagcttacaccggttgaataataaggggtttggcccaatgggttggagatattctgtgggggaaaacgggatgattccccggtatgcggggacgaacggaagaagagttgccgacatattgcttgctgtcaactgtccagaatatttcttcatggtattggcaaattctatctacacataagttctgcagggacaaatagaaccccgggcttgctgtataccacttcagacgcctcgctctcgaatgcagctctcgagatagccggcacataagtgtcttcttcctgtgccttgaagcttccttgtcagggcaacgccgggatgaactcgagctcgaatccctgtatgctaggaattgtgagcggtcgcggcggacgtgatgacctttatgttaccggcatcgcatgatggcggcgattgatgtggcaggcctggcactagaggaaggaggaaggaggaaggagtaaaagttcggcaatatgtcgcaaaaacgcaacaataatgcattaccatccactctcaccgatcatacgaccaagccgcagggaccgatggaaaaaatgcatgcttcatgtcctgaaacgcagctacatcctcgttcattatcacggaaaaattaatcgcagagccagcgtcagggtcgacggggagccaatttgatgtcatgcgggtactcccatctggcatctcgagtggtgtgagacactcttcttctattcttgagtgttgatggcgcggggagctgagactgtgcgtttgtccatgagcctggtatggagattctaatgccgaggtcgcgaaacccggcccgaaatcgaattgcatgtattggaaatcttcgtagtcgacttcaccttcccacccgcttgatgaagcatggcttggttctggggacgcgtgaggatctgagtttggagatccagggaagaaggcgagggtctttggggagggagtcatgaagagcgctctttgtgttgcgagctgtaaatctggacggggatggatacgggggtttggggtggtttgggatgattggcgtgagaaactagtatgattgttagctagctagttcaagatacgcgtcttttcttcttcttttgtctcgccagcaaggcactggtagtaatttaccttttgacattgtttttcgttcctccacaatcctctctcactagaccggcgtcataccatgtttgcggatatggttggaatgcggtcgatttgaccgggtattcatccacccagcttaactgctcaatagcccgggagggatctagtccctcctgcatcgtcagaggaaagtcgctggcgataaagggatgcagaccgagctcatcgtgctgtcccacatgcaaatcaatgagactctccataggccaggaggtagtctcgtatggaaactgagcttcggtcatggtgaacgtgctttatttaccacaggttcaaatgacgatgggggcaaatatagtaggcaagacacagatcaaagagaaaagatctggttggagttggagttaaagttgaagcttgaaatagtttctatctctgtatgaccttgctaccagcgcaaagagaaaagcaaagaatgattactcgcaaaaccgggggcatcctgtacctatttaaaccaaaagaaaatcgaattcaacatcaaatcacggagctggggagctgtggaaatgcggagttgcggagaatctggggcagctccagcggcaaatatattcctagagaccgcatgatcccatgagatccttcaattaaccgatttccccggattttacggtcaaggccgtgcattcgtgggaggttgttgtccaatcggtcaattctggtacctcggcatcgagaatttaatcgaaaccccgccgttgagcggataaattgaagaggctcgaggcttcaggaacccaaataagaacggggaatgacatcgccttgtttcgtacttactatgtaggtataaccggtttaatatagggttcggaggaagatattgtccacaccacattggaagaatggaccgagataccctcaacggtaataaattatatacctccagatttatccgcccttaattgttacatagaaagaagcttccaccgaggaaacgccagatatccaaaaacgccactccagaactatacaatgcgtagaaaagtagtatccagtcaaccccaagattgcgtacaacatagatcgaccgtggggaaaggggttcccactcctccgctcaggtaggcaaacccacatcgggacgcgtgctttatcctgcagggcgcagggatcgacaggaacagagaaatcctagccgggcggcttgtggggtatttacagggccaggccagtcccttttcgcgtccagcgataaagcgcgagaactgcttttcggcgatgtcgaatttcactcgggttaacaggtcgacctcgagcctgggcaaccgcagagcgcatcacttgccggaagctgcgttggtactccgtgttgagggtcaccacacaagattctgtcgctcggatcatggtctcgcacgcgttgagtatgccctcgcctgcttccttttggaggcgctctacgataagtagcaggaggaaactaccctgcagcagctggatgccgaagaagtaaggcatgaaactaacgtcggggtcgaagcggaggatttgttgcacggaatcggccgcttccagtgcgtgtgagatggtcgacgcaaaagccggggaggatgtccagaaatctttatcttctatcaatgagacaggatcccactttccgacgagcaggatgtggaggacgtgtgtaaggtaggaggaataggcaatcacggtctgggtatgccaagaataggcctcggacaattgcggatcgacaggttctggtttgttggtgtaagcagtcgttgacgaggccgctgggtctgccgccgccgccgcgaaggttgtgagactagctttgtatatctcaagctggcgcagcacttccgatacgtgaacctcccacgcttcctttccttgaagcctgacaccgagagtagggtggtttcgtgcctggtttagatcgatcagttcgccagtgatcgtcatgagtgggaggaaaaagccaagaatggagtggtcgtggcaaataaagttggggaaaatgcgacgtttattttggtcgcccgaccggaggcattggggcccatcgggacgaggactattgctgtgaatgattcctgcttgccaggagctttcatccagtggaagcaacaggtcctcgctctcggcatccagtagggctagcggacgattatagcataatgcaagatggcggtccatgatatatagcaaccaccaggttctgcgccgctcctcacgatgctcttctgtaataggaacattatgtaaatcatgttttctgtcacatacacaattcagatttgggcgtgaaggattagagtagtccaagcccagcccacctggagaaccaggccatccacctagaccgtagccgaaggacggacttgaaccatcgctcatgctgtcgatattgggtgttatttccatctcttgattcaatttaagttctcgagctagtgtaaaggccgcatgccacctagtttggagttagtggagtggacaaaagataagagcaggtgtacaacgaaccatctcatacttgctgccttctgttcactagatgagataatcgaggccacatgaatataggtaatgacatcgtctaaagatccagcggggcctaccagccctttatcatcaccgactccttcgaatgggtggtgagtccctgcagagaagtcgtgggtggttgtgttttcggcgggtgatgaatcttggtctttgaatgagacatgtatcaaaggccgcagtaagcgaataatcaacgcacagagaaattggcatatctttctccgttgtaatggtgagatggataaagagaaagctcgatcatccacagcagctacccagagcatacttgccagcaaggcaggactagtgggcctggggcggtcgacacttagaaaagacgtctttcgcaggacatagcaatgaatatgatgacacacaggatgcatatgggttgagaaagcactagtaaagtagagttcaagcagatcgcacaccagtcgacgcgggaggtgcgattcgagaaaaggcatgagaggttccaaaacagggtacttcaatggcgaccgggagattgatgaccgtcttcgtcttgaagggttcgtccccgacacagacggtaggggaggggcgtgctgggccgcctggtggccagcgaaatcaaccggattccaaatatccatcaaccggggcaaaggcgcgtcgctgccacccgttcctgcaagcatatcgtacgagtctggcgacagatgtgccgctgaaagccattcctctgtgacattcgcggcaggccctgtccgctgcggctgtggacaatctggcatagaccgagggtcgtcgacaccggcgctgatctcatttgttgcaggcgatggctgatgaaaggtcgatgtgggagaattgttttcaattggcgacagcctctgctgcgactgcgactgcgacttcgactcccgcttgtgttccccgtcggcctgcttcccctcggcgcggtcctgggttacctcgtcctcggcattcgtatttccatttgtcggcttcgatctcgcaatacgtcctcgtttccggcgctcgcgggtaaattgacagtgtatatcaccgcgaagacacctcgagcaggggaaagcacgatcgcatcgtacgcggcgagtatggcatgagtcgcaggcgactctgtttcggcgccatcgtcgcttgccattcggtagctcaacctcgaccgagtcaggggccggagacggctgatcaccctgggactccatttcgggacgtcattggcgaggttgagtgttgaaaaaaaaaaggaagccgaagagaaaagaagaatgttgcggggaaaaggcatcgggcaattggacttggcaatttctccaactcatttagttctacggagtactccatcggaggaacgttgatcataatacgcttcattcttatttacatattcactattcacttcaccctttctggagtacactcttgaatcgcttcaacgctcgatctcgactctctgcatggtccacaatgggcttggggtagccgttcttctgcgcaatagccgcggctcccctcgcatatggttcatggatggctttaccagacacatcgcgcagctctggcacccagtggcggatatactctccctccgggtcgaagcgctcactctgccgaagaggattgaagattcggaaatatggttgcggatccacgccagtactggacccgaacccccacccgccgtgattggacgcgaagtcgccgtcgattagattctccataaagtagcgctcgccacggcgccaatcgagcattaagtccttggtaaggaacgatgagacaaccatgcgcgtgcggttgtgcatccaggcgcagtggcggagctggcgcattgctgcgtcgacgatcggaaaacctgtcttgccatcgcaccacgcttggaactgatccttatcgtactcccattcaatatcggtatgttcgggcttgaagcatttgttcatactacaggaagtctttgcattagaatgggaaacccgttggcctaggagataacttaccagatgaagggccagttcaccaggacatgtttgtagaagtcccgccaggccaactcgctgatccacgtcatgtaaccgggatcgtatcgatcgagatggcctttgttgaccctcttcgctgtcgcgacagcagtccttacgctcagcgctccgcatgcaatgtaaggactcaacaccgaagtgtgctcaccgggcaacatgctccgcaactcctcgtactttctacctttctcctcgagaaatttgtccagccgccggagggcttcatgctctccggctgggtaaagtccctcaaagcgtttctggtcttcgcccgacaaggtatgggttttaggtgcggctggcaccttgcaattgaataaatccttcaattgatggcgcgcgttgcctggatttgacccgggctcctcagagacctcgaggtaatccgggttctctttcaagaaggccaaccaggagcgataccatggagtgtaaacggaatattgtttcccttgctggctagccagcgcgcccggagtgaccacacatgtgtcatgagtgggagcgaaattaatatcattatccgcgcaaagtctaacaagcttagcttcgcgtcgcagttcatctacctcatactcgatattcgcatataggttcttcgcaccccactgttgacacaattccacaatccgtttcgggattgccttccgtttctcttgtgtttccatgtgcagagggatatccaactcccccaggtcctgttgcaatcgctcgagggtgcgcagcgtgaaatccacccgagcagggctagtcaaatgggcagtccaatcttcgggggagacgatgtaaaggccgatcaacgggatctggttttctttcgcagtttggtaggcagtgtacagtgacctattatcatgcagtcggagatcgctcttgaaccaatgtaccacggcattacccacgttgatcgactggcgcttggtggcggtttctcggcaagccctctgtagcgtttcaatagggcgttccagctcgccatcggtgtatgctcggcagcgctcattgctcatctcggccggatagaactggcgtaggactatgccgaaatcctcggtttggttcgcgttcgggtgcggttggtgcaagtctggtcggccttttttgctagcactcaagccatcatgcttttcagctgccggttcggtagctttcctcttcggtggcatggctgaaaggttgcgaacaagctcggctcgcaattgactgaacagaaacaggcgcgggattgatctagaacagcagagaggcagtttctgcattactgagaataacaaggacaaggggtgctaaaaggtatcccaagtccttcgatccagatcgggatcggcttcagatctgggtgacgtcagtatccgatctgatcgcgatcgcgtccctgtctacggtctggacctgttggacgcattccttggtcggaccatgctagttctgggattccgattcatttcagttatgccacggagtagtgacctcagtccccgtttcttgccaatggccaatttgggtatacggcagatctggcgttgaccaatcccgcgaatgtgaacaggctcttgttctggtaccaattccccacaacgactgcaattaaccaggaagtacttatatttcatacttgtcatctccgagggctcatattccatgtcttccttcgttgacaaccttgtcaactacctggccaataagtacaccaaacctcaaaacaagggggatcgacagtcgagaacaaaaatccagccaccgttcaataatgcgatgatggaggcgtaacaaagggagtccatccctgttgatatgtacttctggagtcagctctaagtataccccaaacttccggtccatggcctcggaacttctcgaccagtctgctttcgtcaatttccccacaaccccggctgtcaggtgctcttgtatgatccgattgcctccattcgccgccgataccgtcaaagttctccccgccactgttcagaccctgaactttaaggtcgctgggaacaaatttaatagtttattcctatcccctaactcttcccatcttcaattcccccctatatctatatctatacctatatctcatccctccttccctaatccatctaccccagtgcacaaccagcaatgtccctcaaccgccaatggccacaaacgacgcccgcagcgttgaagactaccttattcccggcaacggcccatccgacctagctcgcacaggcgtcttcgccgccttcgccgcactagcctggtacaactccatcgagctcgtcatcctctgctttttctccttcagacgctggaagggcatctacttctggagtcttctaatctcctccggctgcattatcccgtacaccctggggtacgtccttctcttcttccggaccggcgttaccccctggctatgcgtgaccctcgtccagctgggctggtacggcatgatcaccggccagtcggtcgtgttatggtcccgcctgcatctcgtgctgcagaataggagactgctccgcggtgtgctatggatgatctgcattgacgctgtcatttttcacatcccgactacggttctcttgtacgggactgttgctcagccggcgagtcactgggcccgcgcgtataatatcatggagcgagtgcagctggtcggtttctgtgtgcaggaattgattatctctagcatctacgtctgggaaacgattaagctgcttcatctcaggcctgaaggtcgccctcatggcattctgaaccagttgctggttatcaatatcctcattcttctcttggatatctcggtcgtcgtcattgaatatgtcggctactatgctatacaggtcatgttcaaacctgtcgcttacagtatcaagttgaaacttgaatatgctattcttggtaaattgatcgcggttgctcgtggtggcggctccgatagtcaggagatgcactccagtacgcgggagatcaccgagtctagctcgtttccgtcgaatggggatcggcctgcgaaccgggagacgccgatgcgtgttcgtcgcgagtacagtccatcgtggtttgggggaggaagctctggtcattctacatctagtttatctggtgtcctgcagaatccatgacagcaggttttagctcttggcttgcttgtacctaatcacatagatgttgagaagctctatctctttacaggtgatatagcatgtctcaaatgttcatacgagaaattaattgtcgaaaatatgcgaaaatattcacaatggctccaagcgatatctcaaatatattcaacgatagtaatcagccaatccagcggtacccgcctgcagcaccaatacgctgccataaatcttattctcgggctgtaccatcgccgtaccgacaggtcccagaacccggcgggtatcatgtccaatactatcctccgaaagacccagctcaatattagaagagacactacgacgaccaacgataataatgttgttcgccttgttcgaagtgtggttaagttcttcacgcacagaaacgacagccatttgagctgcgtcggtaatggtatcattgacagctggttggtggaagacgacacgctcttgaagttcttctggaacagaatcacgcattgtttcaaaaaagaccatatcggactgagagctggacgcagggatcgcactcgagctcgaagcagatactgtagtcaccacggctgttttagtgacatcgcctcccaatcctccaatctgaataacagtcgcagtgacctgatcattctgagcgagctgcatgaccatccgaagagcgaagcggtcatcatcaccgccaaagaatggaaggacaatgtggtgggagcggctgccggttggctggcgggcgaaaattgagccctggagactcatagcgctggcggtacgtgagatcacggggcgctttgatgaggcagaggatggactgtattcaattaggatgcccacatggccggggacccgctctaatatatcagaaacgaagcttgtgtaggtgccgttggagaaacgatttgcgtcgtcgatgtctagcccattatggcggtcggccagtgttccggtctcgctccaggggagaaggagcagatctgcggtgtcctgctgcgccatgccgatgacggtgtctgcgtaagagtgctcggggacgacagatacaccagccatgagcgagagatcgtgccagtctccgaaggcgcggaaagtgttgactaccggatcccacagtgcatgctcgcccgcagcagcaaccttcatgacactggaatcacggtcggtcaattccatcagcctaacaccgtgcaccttaagtgtggtgttttcgtcctcttcttgggtaataggatcttcgacggtttcctcggtctgttttggcatctttgaggggtgaatgcgtgatgacacggatgcacgtcgctttgaactgaggagggctgctatagtacagacacccgaaagaccatcgagacgaaggtagacgaggagcttacgtactgggacggtcttcaactgatccttggcaagggcgacgctgtcgttgcggccatcatgctggatagggttgccttcccagtcgatctccccgcgtctccaccggtcgaccttgacctggtaccatcttggatacagcaaggtggttaatggagtggtaaggaatgtggtgaccaaggccatcacgacgaaaattgtaaacgtgcgagtgctcaaaatcttagcttggagaccaatgttctggggttactgaattagcatccattctcaatcggaaaactccctgcaggttgtactcactagcacgattaattccaccaaacccttgcaactcattaacacaccgatcgaaaagctttcgcgccataaaaggccacagagccgcgatgcaatggcacctccagtgactttcgcaatgaacgcgatggcgattacgccaaccacataaccccagacgattccagagtcaagaaggcccagattggtgctcagaccggacaaggtgaaataaagtggcaggaaaatgacagcgaccaaatcctcgactttctcagtgagcttgatggcaaagccgccttcgtgtgggcagatcagaccgatgacgaagcctccaaaaatggcgtgaacaccaataatctgtgtgaagaaggctgaagccagagcaataagcagagtgagggccaccactgactggctgggtcccttttggagactgcccgttttctcgaggaagcggaggaacagtgggcggaaagcgaaagtcaaaaacaacatgtaggcaacgcagactagtaacacgtacagagccgtgattccactgcccgcgttgacaagagcaacacatagtgcaagcaggatccagcccaccacatcattaccaacgccagcggacagcacgatcacaccgacccgggttgagagcagcttcagctcggtgaggatacgacacagcacggggaaggccgtgatggccatggcgataccgatgaacagcagataggtaccgaaggcaatgggcttggtaccaggatcatcgtggaactcatggtagaggccatatgaaatggcacaacccaagccgaatggcaagatcatgcccgcagcggacacgctcaaagcgacccgccaattactgaccaggaagcgaagatcggtctcgacaccgaccaagaagaggaagagtataagccccagattggcgactacattgaggctgggaatgctggcggtcgggaaaatcgcgtcggtgaatccggggatgcgacccatcaccgatgggcccagaacaattcccccgatcacctctgcgatcactcgaggctggcgaatctttgagaggggccagtgtataaggcgacatagcacgatgattatgacggcctgcttgtcagttatatttctgtttccccggatggcgacatagttacctggataataaataacaccagtggattcttggagtcataatgggttgggttgccgccttcgaggatgccaccctgcggactgactgcgttagtgctattggccgtagctgtcgtggtcacgttcgcggtcgccatactggatgatatccagcttcggcagagagaacaggcagaggagatcttttaagtcacgacgtctccccagcccaagacaaatgaaagagtcagcctacgctaagaccggggccaataagatttaaagtgccatggatccttaacggcttggcctcgctagtcccaacgtggattggtcgaaagttcgaattattcattcaatgcgggaatcacgtttctcttcttgaggggaacaaagcaaatatcactgcatgcggccgaggaatgggcagtctcgacggagtacattctttttttgctgtgcacgaacacgaccagccctgaaataagaaagagttttcataatctgcgcttttgtttaaagttttcacgtggtgatggtgacatgacagctcgggcctttggcgaggcaggtgatctaccccggattctttccccagacacaacatccacagcatcttacggtctatgcatcttggtaatgtgacatctgattctacaaggtttttctgataaaactcgtagcttgttggcatgtcctcttgaatcatatgtctttgtccatgtgatggagcacgatatacatgtactatatatagtgggtttgaggtcggaggtcattaaccccttgagttcaatctcgtgtatattgtaattaatacatttttggcctgtaagattaagtactctcattacagcgcttccaatatatattccaatgatctatcaacatgaagctattcagagattacctggtcaccatgagttaatttaaatcgattcaaccaacaataataaagataaattaagtctaagaacgacttttaaatgccagctagtagagagtgtctaattaatcaaatgcgccggtatttaatgctagttgtggctcaattgtacaaaggcttcagattaaaggtctcatagagaccaaacccaatgaaacaccaagcaaaatgcaaaacctcctgataccatctaggaactgaaccaatcaagccttcttcgtcttggccttggaggtccgcactctgaagaggtaatagagcgtaatagcagcaaaaatattgaaaaagaaataacaccagaagatcccgtagtttcgccagcgatgaacccactcaatcttcctcgcagcaaggtactgatccgccgaactgagagaacagtactcacagccagacgtagcattgtaattggcaagtgtcccggctgcagtttcgaggtacttctccatatactggaagcaggtctgaccagaaggcggatcaaagacactcatctccgcagcattgcactccaccgggcggccatggagcgctgtagcgctgataccgccgatgtagtaggtaaatggtgagacgcgatacatgaagatccagaagcggggcagatcatcgggcggctgcatcacgccgttgaagatgaaggaaagaccgaacatcagcgtggcgaccatagctgcgagtgcaggctcggggattgcgcagacgaccagctgtgccatgcttgcggcgtagatgtagaattggacgataaatagcatgatcagtgcgcggcgctcggagtcctggtcggcgccgaagacgcaccagtagaagcaggcccaggagcagacgccgaggcaaacttggaaggggatttcgacgaacatctgggagaggatgaagactttccaggagtagatgcgggatgggcgttcgcgaacttcgtagagggaacgttggacgacgaacttgggcatgatctggttgacaagtgtgttgaaaattgtgcacagaaggaaaatactgaagagcacgttttggaagccttgttgggtgttgtctgatttccagaacgagaagccgatgaataatccagacacaatacccaagataaatttggagtagacgtattctggctgacggtagtactgctggaagactcgttcaagaacataatacagctggcttctgagtggcatggcgaactcggagttgtcgtcgtcaaattcgtcaggcccgtccaatgaaggtcgataagaagactgtttgggatcattatgaagtcgttcgacctcagcctgtacctcttcatactccgggctcttgttccaggccgcaacccagtcgattgggcaagaatctccagcaaccatttccaagatgtattccgcgggattttcgagttcctcgcacggtcgggcgccgttgttctcgaagtaattcaaaagggtggaagactgatttccgatgtcgccaaagtagacggtctttccccccttcgcaaggaagagcaaacgatcgaaggtttggaacaactgcgcgctaggctggtggatcgtcgcgaggacagcctggccgtgatctgcaagtcttcggagaaattgacaaatagtccaagagctttgagagtccagaccgctggtaggttcgtcgaggaagataagcagggtaggtttcgcagcaagttcaacaccaatgctaagcagcttcctttgctcgacgttgaggccctctcccaggcttcccaccaccgcttcggcgaaatcttccatgccaaggactttgatgacttgttcgacgtactcatacttctcatgcttggtaaccttctggggctgacgaagcatagcactgaaacgcaaagcttccctcacagtggtggtatcaagatgaagatcttgttgttgcacatatccagtccgacgggggaagtttgccgcaagggtcttgccgttcacgaatatatcaccagagacaacaccgatagagactctctgcgcaaggacatcaagaagcgttgtctttccagctccagaaacacccatcaaggcagtcaggctaccaggcttgacccagccattgacgttgtccaagagtcgtcgggtgccctccttcacggggatatcgtagttgagggagttccatgacagaatgtccttttgctcgggtaaacggatggtatcattggtcatctggagctcgagcttattgacctcctggattccaagctcgatgctgtgaccttcctgcagatacttgggcgcatgtccagggcggaaaaccagcgcctcagcctttgacttgtcatcagtaaggtactctgtcgcaaccaagtaaagtgtattgagggcgataaaaaagccgatgagaattccgtagttccgccacaaatgagagtgcttgtactcgtagtttgcttcaatgaaagcatccccagatacagttcgttgaccggcgactgcaccgacagtggagcagataaaggacgtcccagttccataactcgggatgaatgcggaacagtcaaatgttcgaccatggaattcattggccacgagcgcttcgaatgtatagtagatcgggctgatccaccggatccacgaaagccaaggatgcatatatggctgtgggagagtaaatccggtatagacgacaatgcagagcacaagcacaccggcaatcgccatggcctgcccaacagatttggtcaaggcaccgacactgcggaacaagccagacatggccagaactgcagtgagcaagaataggtagtggatgaagaaagctcccgcttcacggcgcaggtttgccataaagtagaggaccactgtgaagattgagattcgtatgatcttgatcggtaaatcgatgatgagactggctagtgcttcagtgaacgggtggacaaatgcatacccagcttgcttttcgacaacggggcgctgggcatagagttggaggatttcgttgatcgtaagaatggcattcatgagcacagcaaagtacatcactgcacccttttgaaagaagaaattgggggtatcaggagtattgtagaagatggatccaatgatcagagatagaatgatctgaacaataaccggtgccatggctgttggaagatcttgaagcattcgctggtaggctctgtgtatgcacagccgtacctgcatagggatggagagaagaaaagggctacgagctcgagtgtggcgagcttgctgctctttgtggctttccatgagtcttttcttttcgtcgacatttgggtgatgttcacgttcgaattcggaaatttccttgtgtaagagctggtactccgggctatttttccaatactcggaaaactccttcgctgtgcgggggaccttgccttccatgccaggccgtgccgtgcgttctgctgggttggtgattgcagtcaaaaagtcaccactgacttggcgctcaagtctctgccatcccatgtcttggaaataggaaactgcacgctctctgggtccataatagatctggtatccttcgtatagaagaaccaccttgtcgaaaagatcatacatcgactgtgatgcttggtaggcggcaatggcatggcaggattgccccatatcagccgaaaggcgcaatgatctcacgaatttcagggcagatgcggcatctagaccacgggtgctgttgtcccatgctccgatgcgacagcgagacaagaacatctcggcaatactgactcgctttctctcgcctccgctgacacctcgtacaaaattgttgcccaccttggtgttgtagacgtgggacaatccaaagacggacaggacaacctgagtgattgtctcaacgtattcattgcgggtcacacccttcaggcgttgttggggtgcacgagcatgggcggcgaatgtgagggtctgacctacggtcaagtggggaaaatgtaggtcgacctccttgttgtatgcgacatctcctcggtgatgtttgatcatatcttcaaatgcgattcctttgtaatggattgaactttcaggccccacggtcaaacccccaaggtgtccgcagatagtcttcaggaatgtcgtacatccacttccaggtcgacccagtacaagaaggagctctcctccctggagtaagccatcgaagttgcggagaatttgtcttggtggtgaggtatgcccagtcaaagctctggttgcagctcggaaggggactctcaaactggaagtgagggtttcctggtattgtagagcggagccagagccatgtatggatagattggagaataccacgccttgattgaggatatcgatgcctgaatcgttgacctgctccagtaccatttgcgcccatcggcgatgatcgaatcggggattggtgggatcgaggtatggggggataccttcttttgtgctggccgatcttgaaagctgttggccgattttgctagaggcaatgcgagtcaaggtctgttgttctcgctcctctagtatagttccagtgcgttccgtgattggagcgaactcgggatcaccatagtcctccatggcgaggaatggaccaatgtgtatgtttgtgtataattttgagctcctgggagcatcgggcatgcccaacccttttaatcaaatcatctcatcggtaaacggacaacgaagccaccgaagtatccatatttatttcatcgggttggaggctttccgatgtataacggagggacggactccgtttcaccgaaagcttctactattctagttattctagtggagctcaggtatacccatagcctataggtacctgcctattattagtattgagaagttttctcgtctgatcgatgattctcattgaaaagagatacggcagaaatataaaaaagccggtttggttgcatcatactgcattgcatgcctgtcaaatatctacaagtcacctgcgcctccgttcagaatctcattattattatactccgagctccgtacggagtacacggatagatattatcttcaaatactccaattcaggttttgaaacggtttacgacgacaataattgagtctgagtggagcctcgctgaatatccatcccgaccccgagcgtaaaggaggtatcggcgattaggggtgtcccttatctccatggtctttttgtagtgtttgcaatgtttgcagtgtttgtagtgtttgtagtgtctgtcatgcttgcatcttggcttgtagccttaatcctcagacatcatttcgtcacccagcgctagactagatcgttgcttgatatgaataagaatctacttgtttaaaatggacaattacttacctccctgactatcgagtgcaatcaagtattctggagttgccaatgcttattttatatcagtgctaaaactcttttgatgactattcttcataatcacccagtccgcgaatgactggtaggtcactgtatgattgcatctgttgactgcgtccaaaggccgtcactagacacactttcagtctgcctgggacctcatgcttcgagaatttctgatacatctctgcgatgttctcgaattcgtccacatacgtgaacatccacgacgtatctagtttaccttccaccaccagatccattaagaacggataatactgcgcctggtcagtcatgaattcagaccagaagaaaagaaaacctaccttttgcggccacgtttgacctccacggactgtcagagctttctgcatcaatggcccgatcgggaaatcatgcgccgtgaaaaagaaatccccaaccaatgctacgttaccacccttacgggtcgccttgatcattgccgataatgtatcactattatccctctcaagcccaatcgcccgcatagccgaatactcaggttcctgcgaagtacgatacccactagcctcaatagactgatcaaggccgtggttctgaagcgacagaatatactccgccacgtccggatgcccatccacattaaccggaatcatgccaaagtcctctgcgatctggagtcgcgccgcatccttatccatggcatagacctttttcgccccacggagcttcgccagtcgctgcgtagcgaggccaataggcccacagccccatacccccaccacatcgccatcctgcacctcagccaattccagcgcatgccaagcggtagtcacgacgttcgtcaagcccagtagcttctgcgcatcgacatcgtccggcgcccggacacacgataagtcggcatgcggcacgcggcagtattccgcctggtcgcctggatacccgccacacagccggctgtagcccagcttcccgccgagtcggtggccgtacgtggattccgtatccggggatgggtttgtgttgtcgcagagcgaatactcctgtcgctggcaataactgcaggtgccgcatgagatgacgggtaggatgatgacccggtcaccgggtttgagggtcttaacgtccggtccgacctcttctacaatgccgagggcttcttggccgagaatgtcccctttttccattgcgtctttgagctcgccttcgtagaggtggatgtcggaaccggagatcgtgcagtgggtgatttggactatggcatcgctggggtcggtgaccttgggcttgggtacgagtcccacttcgatttttcgtgtgcccatccactgcgctgccttcatcacttccgtggggtgcggcgtgtatgccgtgctgcgttgtattagattgaggctggctgtgtgcggaggcatttcttacctgggcattatggccgccatagttgtgagtagtagtcaattgccaactcgaaaaatattagttcgaatgagtatcgaggggacttattgactggctgttgatactgtcgacgtatagtcgtttgctccaattgttgaagattgagctatggtagacttggagcaatggcaaattaacatcaagatgatgccaccaggagtggccagaaagtcatagagttgccatgaatggtcatctgatttctcggtcctatggtttttcagaagacatatccgagccggaaactaaggccggctatcaacacctaacggttaaggcaaagatcagtatagagtcaataacattgcagttagggtatctcgatctcaactggctttaaccacactatttaaatttaaaagtacatttgttcagcattggttcaatctcatacatacactggtgagaacaatgtacaggatcatttcgatgttggcagggataacaagtcaatgcatcgtattcatgcgaaaagaaaataggatatcttaaaaagaagaaccggcatctttattcgcccgctgagcaaaggacttgggcagtttggttaactggccgctggccataatgtcccccgaatcactctcgctcctgctatcatcgccagactcagatttgccggagctaggcacctcgtatacattactggggcgatctcgggcagacttcggctcaggtcgcagcttagcagccatttcctgttgttggctgctaaggatatccttgagtgttggattcgttttctttgcaacaactgcccgaggtgtggacttttgcgcctccagcttctgttcacaggctttcagttcattacgcaagggttcaagtcggtcgcggagcgactttcgcttaaccattgcgagcctagagttggctaatttctgcaagagttcctgcatctcagttaaaatgaaagtaagctggggatcaaaggctttcccaagcttgcgctttatttcttcttcctcctccctttcctttttcttttgttttgtctcctcggccctagactgtgccttagccttcttttcgatctcaatttcccgggtcaactggtcgatatcaacgccgagcgggtagaccacttgactactggatggtatttcctgaacatgcccggaagcgggtttgggtgtttggttatcgttattggtcttaggcgtgacttggctaaatttggaggtcgaaggtgttcccggagtagatttagcattgggcgtgggcgtctgtagagtagactttgccttatgtgtagccttccgtgggctagggttgttggtaatggaggtggatgtgctgatcgcagtctcgcgcggagtggagcgtggagcaggattcaagctagaagcaagttcctctccttcggcgaaagacacggatcgcctctccgttgccggggaatccttaccacggatagcggattgcagcttttttgttctggcaatcgcaggggtatgtttgttaacagcagtcaaagaagactcatcagtaacagaaactttgccacttgggaaaagcggcccaccgagtgactgctgggtaggtgttacgtttgaatcctgtaggctgacgggctgcttgctaggagggctctgcgtaattcccagcccaattccagatcgaggaggcttaggaggcgctttgttctcctctcgaacactggcttgtcgagctggactcgagaaagaaggcgcacgggatcgtctgcgaagtggactcgtttgggcaggtggcggtttcgatggggactgccgagcctgttcagaggccacaatggccgcgggcacggacacaggaggggtagatgttggccgcgtcgagggatgggcctgtccttggcgagcttctttgaccgacgttggctcttcggaggcctgctttcgcttgcgagatcgattctcatgggttgtaccatttgttgttgacatcgcgagatccagatctgaggactggaagctcccgggtatcacaggctcttccatctgtgaatcgccctctagatcaatcacatccccagtgatcggattcgagttatcaatttgagacgtgataggtccattctcttcgctggcatcagagtccgagtcagactcggactcagagctatcagagctatcagaactatcagagctatcagagctatcagagctatcagaactatcagagttatcagagctatcagaagtgtcagaagtgtcagagatagtctgatatcctgttttcctctgatcctgctcggcgttcttctttttctccgcttcgaccttgtcatcctcgctgtcactctccccttcgtccgactcctcactagaggtctcgatcacagtttccgcttgagatttctgcgggtgggatacaatcttagccattgtcgccagatgcccttgtgcgttgactccattggtcatgtccgacttggatggtattttcacgttacgttgcggagcagactctggtgccacgtcactcgagctcgcggtagcttccttggtagattgtgtttgttggtgggggatgatatggttaggcgcagacgacatgggtggggattcagcgtcgtcagggatttgcgtgattgttcgcttagctgtactactcgcaatgggtaactttacgagcttttgcggattaggttgcagtggtgacccagcagctacaggtgcagctgtaggctgggatctggcgctggatgctcgtcgttcggctggtgatggagactcgcccagctcctcactttcgtgcctgggaggcggcgttccagcaattgtagggcctacagacttcgctggtagctgaggggtagagcggttgccggtttcaacagaagaaagaggtaaatcgcgattgcggtgctcaacaggtgacttccgagctgaggcacgagggagattattgggcgatccaggcgaatgttcccattgcatttgatcctgggaaagatattgagagtgaccgcgcgagggttggccgttgctctcctcatcttcttcctggatggcagggaattgggcttccatggcttccttcttagcctccatggcgcgcttgcgtttgtaggcaacaatagcagcatcccaatcctgctcgacagaggggaatcgctccggggcagccgcggcaggcttttgaagaacgcgaacggagccacgctggtcaaggccatcggcgcgagctttcccgtagtcgacccagacatcagcaacagtcaagtcgggataaagatcgaggtcctcctttgtatcgtcgagaatcttcttaatcgaaagcgatctatcaaccaacaacaatgttagcaaccaaatttcgacagactagataagtttctcatcaagtatatgaacactcactccagctctgggtggagctttccccaatgctcttgaatcatgtccgcaagtccaccgagcgaaacctcttcagggtgctcaaggacaagcaagaagacaccgggtttcttcaatgtcggttcctggttggagacattgttggtagtctttcgtgcgccagggaaggtcctgccgtagctggagctcgagttcagctgatccggcgggaagactttaattgagagtcggaggaacaccattgcgccagataatagaataggcagtagatgaatatgcagctaatggttgtgattggagcaatggcgcgtgagggagggaggtcaataaaagccggtagagctggggaggggcaattaatggtagggagcaaattagcaaagacaaatttatcagacacacatgtcctctcaaagagacaaggtgccaaacaccaaacggaatggtgcagggtgagtgggtgggagggagaagaaaagcggaagaaactgacgcgaagtagtaattgtccagctccacttaactagtgtactagttatctgccgtgactatctataaaacacatctgctaatttaaatgagaagagcaagaagataataattcatggatactaggctattgttcgttgtatcctaaagtcctgtctataatctaaggttacgggttcctgcgcagttccatacaatatagatgaacagtacagacacaaattcttgtagtattttcatatatgatttttaaataatgtctctagagatggatctattccggaggcacaaaatacctccggaagcgatcattgtgagctaaatccagctcaacaatgaccgaatgacagctcatcaacagacttgggaacctgtatgtccagaaattgagatatccttcaggcaagccaccaatattatccttaagatgatcaggcatatcgttgtagtgattgcgcttgttgcggagagccctcaggagatccagcatccgccccccggtatatttgcgctgcttgccgagattgtctttgaaatcccgcggcaatgagcgcaggaaatccatgtcgggacccattactcgcttggccactgattccaaacaaagcagtgcgtctgatggaggctcgcggggctcaaattcgaagtggtcagatacatcacaaaggaaggcgagacggtctgatgggggccagaagaacgggtgcattaatacagcgcttgcatcaggactagaaattcatgttagtaagttgggtatgtttccgcaaagaagagtgcttaccgttgccgagggtctagagacagcattgagcggatcagatcatccgcctcgaaagcgtagtcgcctaggcggcttaattcttccaaatcgaattggcccttgacgatgtttgcttcacgcatgaacttgccatttttgtcgaatgggtggctgccacgagtcaagacgtagtagaacacacaacccagcgagaaaatgtcaatggcccgagtggcgcggcggttggtctgcgggtccaccacagccggctccgaagactcggtatgctgggatgcaagagatatagggccgtcatcatccaccaggagctcgggggcacgccagccggaagttccagcggcgtgagcagtggttgcccggaacgagctttggttgtcttcgagtttcttgcacaagccaaaatccgagatgaggagacgcaatgaccgcgaaacagtgcggccacggggcatagccacgaggatgttctgcggcttcaaatcacggtggacgatcttcaaagagtgcaagtaacggacaccctgtgtaatctgccgcagtacgtctggcagatctaagccggcttgaactagttccgggtagctagcaggacgctcaatcacatcctgaagagacgctggacaaagctcgaggccaatatacaggaacccggtggcttgttcacggcagaagtatcggatcacgttgtggtggtcatcgctttcctgcaataggcccacttcatgggacgcaatgtcatagaattccatcaacatacgcttgaccgcgacgtctcgtccgtcgaacgaaccgcggtaaaccacagtgccatggctgccatgtccaagcacaacatcagtgaaaacccgaagccggcctatgcgaaccacgccatccatctctataatctcgttcgagatcgtcctggtcatctgtgcatcggtttcaagtcgaggctggggggctagggtgttgacttgttcggcggcctgatcggctccttcggggccatcaccctcactgccaggcttcttgcgacggcggtgtgcctttcctcctcgagatccacgatagcgggtttttttctttggctttccaggctcatcggcatcctcgtcaccaggcccacgtgacggctcgcgaatctgcacccggagggtggaatctggattgtattctcgggaagcacggggggttaatgcgccctccggtgatgcatcctctaaatctaagtccactgtgacgtttggaacttcctgggttggtgtagatgaacgcttgatatccggggcaccgccgacaagaggtgtggaaggggtcgagagagaaggcttatcattcgagttgatgatattcttgatgtccaacttctgctttgccaaatcgcgaatgtgatgcgagttgaagtaaatgaaggtgcagatgaacagtaaaatcaacgtcacgacaatatccaaagcattgtcccagctcttgcgaatgatggcgctattgcgcaaggcgggaggcaaagccagctcagaagggctgcgaaggatatctcgtggtgtgtcattggaaagttcagaggtggacgatccggcgattctaggaatatttggccggattatacgagggccagtgagagagtgaacaccggccaacgcattccgctgctgacgcgcactcagactcataagcgcttgcccccggcggaagaagtctttgtcatagcattgagccattggagcccggcccgtggctaggggataggtttcctccgaaaaggcataccagccccccgcctcagtgcaatcgatgtatacacgcatgtccctttcctcgttaagggatccataatctggatccggtggctggctgggttgtgagagcaggactagcggggtcgaggcatctggtgtatctttgttggcaggacgaaccacgtcaaagactcgcgccacaggagatgaaaagcgctgggtatagcgaggccgacccatgcgcgagtgatcgaatcccagtacaacgccatcatgcatactgtaaatgtgactttcatccatcgtcctgtagtactggctttgtaggtccatatcacgattgtttggtgcccactcggagtacttcaaggtacaaattggatctcccgtctccgtgttttgtatggcaacggcatattcaacccgaccaagaaccaaagtgccagatgtcgactcgcattcatcagattccaaatcttctccgtccaccttccgacattcaggtgcagcggtaattggaccacgggaactaaacacccgcaggatgctgccagtccgggcgtcaatcgtatacaatgtagtttccttccgggcagtataggtcacggcggggtcggtgccggaataaggggtttcgtcaacaagctgcttcactgttaagccgagcttttgcaagccggcatctggggcggggctgtagatatataggctgccatcctggctcggctcgacgatccacaaaaagtcgtcttccggttctgtatcgtcaaaactggaacgattcgctcggtggtagatgctttcgaccacaggactgctcgggacctcgagggcccagcgagcagtcccggtcttacgatcacgggcgtgaatggttccgtcgacggtcgccagcagcacaaaatcctcaacctcccagtcctgcaaggaccgcgcgtgaagctgcgaagccaaaccagcagcagtgctgctggcttggacaggaggggctcgaacggcgcggccggagcctgccagagccagagtagcaagggcgctcgcatcgttgggtttcacgatgggtggtgcggctacatgggccgcattttgtctagatgactcttgtgctagtggcacagagacgcgagatatagggtcatgggcatctgattgctgcagcggagcgaccagagctgggagaagaaggagtgcgacactggcggggagtgtcgaacggacgcccggcagccgccaccgcatcgtagagctgtcagcacaaagattgaatagtagatgaacgatcgagggagcgaagcgggtaggggcgtctcatgggccgatgtgaaagggaagaggtttaatggatcgagtgatagtgtggagcgagtcgagtatccgggtagcggatcatcccccaacccacaaatgatcgaaatggaaaatggcaggaaattcagtctaatgataatgcatgaagagatggatggaactgtcgaggatgccacaatattgaagagatgaaaggatgaaaggagagaggttggagagcaggcagagagattgtgtgtaatacacgtgtacattacaggctgtcaccaggatttcccgcctccactgctgtaacggtaatgtacggtactttgtccacgcacgccttcgatctacactcaatacagcgtagcctagaacaataagaacattcgagagccccttgataggcgtaatccatataacgtatgttgtatacgtgcttatagatgtgacatagaaccctctatgttttgtaccagtcatccttacatacccggttcttgcttactgcgtactaattatggattgatcatttgggacgagtctgtcagcgtggatcttcacatgctaatgacgaagattgaagcctttgagcaaggtgggtcaccctgcgcagcgtcagggggctaagaccaatcaagggcgagacagcacactacgttcaagggtctcatgaagaaagaatcagtccattaccaccaaagatttttttttaaaaaaaagaactatgtaaatcaaagcagcacatccaacgccacaaccccgtcttcgtgcagtacacgccggaagtgccagtgaaggggagggaaaaaaaaaagaaataagaaaagggaaacacaagaaagatcaagataaatacaggtgtagagggatgtggccacagaagcatgtggagagaaagggactataaaacaaaaaaaaagggatatcggatgttcccaagaaagaaaagatggtagatattaagcgtgagacgaccttaaccgccgcggatcatccaggtcacagcaacagcccagccactgacgaagatgacggtcaagatgcctgcacctgcacggtcaccggtaccgatggtattcaatacagggacatcattgtccgaagtattagtgccagcggtcgggttactcttggaagttccacctgatgttaaactcaatggcgccttgttcttgaacggaatcagattggcagccaggacacccagcacagccatctgttgctccagacctttggtcccgtcccaagcggcttgcttgtaccagcgaataccacaatgtacaccgtcatcaccacccgagcattgctttgcagcggcctgggctgaggttctcagctgagggaagatcaagtcgtaggtgtcggggacgattgtagtcaacattccaagccagttggcgaaataggccttgaaggtaatttggttgcgatcacaattaccgccggcttcgcaggtgatctcgcaaagaatttggccaccgtctccattaaatcctgtggtcgggtagaactgctgggaggtcttgatgaggcccacaacaccatccttccatttcgtttcagtgccattagtctagtccgaggttagtatcaaccattcttaggcagcaagacaggacatacgtagttgtgcatgtaggcggcaccactgatataggtggcatagttgtaggtccactggtaatcgccatgatccgtgcactgcgtgccgcaggtggtagtatcggcgatgttccagttcttctccttgagcagcggggtggtagcactccaatcccaaatgcgttcagcccagtcagcatatgtcttatttccggtgtagagggcgaggcgggccgaaagttggaacagtcctccgttcgaaatcgcgttcttcgtaaggtaaccatcctggtacggccaaatctgccagcgcataccaccgtggcagctgctcgtatcccatcgggggtactgggtgttgaagacaccctgtgcgagagatacccaggatggttcgccatctctttcagggtagttgaattccgcggcggtaatagcagcgagaccccaaaagacctgatcgtcgttgcccaggtactgactatagttgctcgggaagaaattgtcgtcacccttctggaaatacattccgtcctgaacggcgtcgttgaactggctgtccccggacacgaaccagtacatgataagggtcatgaacatggaaccgccctcccaccaagtgccatcgaatttaccagggatgtccttggagtcgcgagcattgtagaaatccatcatcgtggtggcgactgttttggccgcatttttcagggaggctgagagaagttactgaattagataatgaatgcgatcgaagggggggagaacgtactctcgtcatcgaggttcacatcgatagcgagggcaccctggacggcgaacgcgccacccagtagagtggccagccacttggacaaaatcatatgtgggatctcaaacgagcgtaaaagccagtggcataagggagttgaatcaaggaaatagaagtttggagagaaagtaaaggtggctaagaaaagatgacggggtaaccggcagcccgggggttacagtccctggtacagtgggctggctccgtctaagaatgttgagttattttaacttccacaagtatgaacattcttacgattattatattctatagattctatgcattttatatattgaatctacattctgcacttcacctctaacaataggaagtatagaattaccaaattgctgaattgctggtcgactgtccctgaacctaaaacgatgacggttagactcagttcctggcggcaaatctggccctgcagtaacgaaatgaaacattaagcttagcgagacaaccccttgatatttgcaattgatcatggtgtacctacaaagtacaacgtgttttgaccagacaatgtcgatctctaactgcacgaggatatattactataaagaatcaaaagcggacaattgccttggctaagggtccgaactgaagtcaccgctttgagtctgccgcttcgggaaccggtgccttattgttcaggtccagcccgaaaggcacatcaacaagacgtaaggtgtatactttaaaccttggaatagttcatatgagtatgagagttgtgctcaccatatgcaggcctgttgtagggttcccttaactctctcgatgatagactttacaatagtgagaccgtggtcatatctagggtgtaatatatctacttggcagactacaaaaatggctagatggatagatcatgtacttagttgacttctattgcacatttttttagttccttcatagaaagactatagagatgaattcatccatgtcatcagaatcgtgtccattacatccggttacgttggcgaggagccgcacggatgatgttgtccacccgcaggagaagctaaataaagtcagcgcgtattccccatagaaataaaaaacaggtgagtgacatacctcggctgcctctgaggcagacgaaaccaccgccttcttcaacttataagcctccaccacaccaagctcacgcatatctgcaataccaccaccgggcgtcaacaggtcaagaccggagctggtcataccgttgttgatggccgagcgcagacgagtcaccagatcgctggaatccagaccagcgttgtcggccagaatggtaggcagctgcttcaaagcgtgagagaacgagtcgacagcaagctgtttcttgccggtcgtattctgagccgcctgttccacggccttggacatcaccatctcggcgcagccgccgccaagtgtcacacggggatccttgacggtctgcgagagaacggccagagcatcgtggagcgaacgctcggcctcgtcgagaagctgctcggtagcaccgcgcagcacaatggtgcaggcctgaccagcagccacaccggagaacttgatcagggtatcctcaccaatgatcacttcctcgatcagatcacacgcacccagcttgacctgatcggggtggtcgaaggtggaagcgatctcaccgccagtaacaagggccaggcgctcgatgccgtcgaaatcggcgtgctcgatggacatgatacccgcctcggtgaacagctgctcgggccagttgtaaatgagctgacggttaacgaagcagttaataccgtgtgccttgatgcgctcaaccttttggcgcatcttctcgcgttctgccttctccaactcggcaagcttgccggtcgactcgaccttgactcgtgcgccgaaaatcttgaccttatctgtgtccatggctgtattggcgaccaagatcttggcgttctccaaccgcttgggctgattcacaccgaccttcttgtccataatgaaaccctcatcgaggtatgaatcgctcagctttccaccggccttcttgataatctggatgtgagagaggtcggtggatcccttgagacgcagaacggcctcgcaagccaacttggcgaattggtcccgatcttgcgacagaaccttggagctgagcgttgtgcgggcaatggcgtgcaagtccttacggaaagcctcggggtcagtgctgcggtcgaccgccgtagcctcgagcgcggcgagagcagccttgctagctatccggtaaccctcgataatagtctgggggtgaatcttcttggcaacaagttgttcggcctcacgcaacaactcggcggccagaacggtaactgatgtggttccatcacccacctcatcgtcctgcaccttagagatattgaccagaaccttagccgcagcgttatccaaagcgatggacttaagaatcgtagcaccgtcgttcgtcaccaggatttctcctgtcgacctgtgagaacagccatgtcagtaattccggggttatatcaaatgatcatcgacaactccaccacatacgcagattgtaggattttgtccattcccttgggaccaagtgtgctcttcacaaggtctccgacggcgatagcaccgacaaaagctgagagacgggcattttcgcccttctcttcgatgacatcgtcaccaaagatctgtgtgggattgccaaaagatgcctaggaggggtagaggtgagccagtgcgaacacatattttccacgctctagcgagttgggaatagcgtaccataatgaccagctgaataaggcaatcgaccaaagatcaaatgtcttgctggagaggttgaatcgacttctcctgtcaacaagtggggtgggaaaggagaaaagttgccgcacgattggcccgagcttctgattggctgcactccatcaccgcctgcgatacctctagacgattcctttcttgtcgtgacgatccctttcgctgggattgaccttgtttctgtcagtgtcgacaatggctgactctggcaaactcgctccggctgctgcgaacaagcggcctcattctgctgtcgaggctgagaacagtgagtcccctgcctcatggacaccgttcagaccgctccctcgaacggaacgcaagagatactaactgtatgcgattgttaggtggtgactcttctgacgatgatttcggccctgcgctgccctcggaggtcgccccaaagaagaagcggcgcaagcttccttttgagaaagtctacatcaatgctctaccagtctccgcacggtactccaagtcccttatgcacaaggaccaattgtcgtttgtgacggttgccccctatacggactttgtgatcacttcctccgtcgatggatatgtcaagttctggaagaagatggcagaaggcatcgagttcgtgaaggaattccttgctcacccagtcgagattcggggcgtatctgtcagcgccgacggccgcagtttcgcaacagcgggaatagacaagacagtgaagattttcgatgttattacatttggtaggttcaataattgttgctctcccggtctaatgacttactaacatggacagatctcttggcgatgtatacactagactttgtacctcgatgtgtttgctgggtacacccgcgtggggcctcgctgcccctgctagccgtaacagacgagtcaagtaatacgattcaagtattcgatggacgtggcgaaaatcccgaacctttgcacactttgaagtcgatccaccgcagcccggtggtttcgctggcattcaacaacgccttcgactgtgtcgtctcagccgatgaaacaggaatgatcgaatattggagagccggagacggatctttcgagaaacccgacaatgtcttcgacttcaaatcctcaacaaatctcttcgcatttaagaaagccaaatccgttccgacagccatcacaatctccccatccggcaaacacttcgccacggtctccttcccagaccgacagattcgagtattcgacttcgcaacagggaagctttaccgcacatacgacgaatcaataaccaccatcacggagatgcagcaagccggcacagcaccgtacgaactggacgaagtagagttcgggcgccgcctaggtgttgagcgcgaactggaaaacgaaggaacgcgcaacaaagtaaacgtttctttcgacgaatccggccacttcctcctctatggctctctttacggcgtgaaatgtatcaacacctacacaaaccgcgtagtccgcgtctacggccgcgaggagccattccgagccctgaatctcgcattgtatcaaggacaaccgcaacggaaaggcatcgtgaccgtctcaatggcagccagtagcaacccgctcctccagcaagccgaagaacgtgacccaatcctcctctgcaccggcttcgccaaggtgcgcttctacatgttcacgaacgaaacagacatctcgaaatccactcgggacgtccaaaacgaaaagccaacccaatcagcggccggcactggtccaaccgccaccaaaacggccgagaccggcactgctgcaatcctgcacacaactttcggcgatatccacctgcgcctatatccctcggctgcgccacgggccgtggagaactttgtcacacacgcccggaatggctattacaataacacgatcttccaccgtgtgattcgcaaattcatgatccaaggtggtgacccgcaaggcgacgggacgggtggagagtctatctggggcggggaatttgccgacgagttctccgttctcaagcacgataagccgtatacgctctcgatggccaatgccgggcctaataccaacgctagtcagttcttcatcaccacggagaagacgccgtggctggataataagcacactgtctttggacgtgcggtgcagggcttggatatcgtgcataagatcgaaaatgtgcggacgcataaggagaagccggaggttgatattaagatagttagtattagtatctcgtgatatatcggcccgggtggaatctaggcgttgtattacaaaatatgtgtataaggaatcatgaaatgcccgcgtgcgttgtactatgtacacagtcacttggtcagacaggttgaaaaaaaatggcgaatatgaccgtagaaagagaatcgacacagtcgtcggcagaagtcgactccgcctatttttaggacaaaagcccaagaaaagaaaggaaggaaaagaaagagagagaaaaggggcgcaaaaccaacaagaacaaaaacacagcatgaagcccattatccgcaccaaacaccaagaaatgcaaccatggccaggtagcatggtatagaagtagcgcattgcgaaaacaaaaaaaaaatcaaggacaagaaaaggacataagaaacccaaagatccaaaataagaagtgaaccaaaacagattttaaacctgccgaatctccaaatccccagagctctggtcgacctttgtcaatcgcgtgcgagccccaggcaccggggtgctagtcttcgccatcgtagagcgcgagctactagccaaggagtcggcaccaagggcggtggtctgcaccggcaccgggacagcccaggcggcatcgcgcggaccgggcggggaagcagcagtcaagaagctgctgccgccaccgtggtagagattgggccgtttagcatcgtagcggcgcttgaaccatacgccgagtacggcgatggtgctaaacccgatgaccagcacgatgagcatgatgatccagcggtagtgggtactccacctatttaggggggatttatttagtgattggtctggatggtgcagttacgattctaatttgcgctgcggtgttggggatcaaacataccatgacttcttcgtgtccgctgtggaggttgtgtttgtggttgcgctggaggtggaagtcgaagtagaggttgcgtcggttgaggatttggttgtggtggtggcagtgccggttgtatccttgccgccggagttgcagtagtcgacgtaccaggttgagagagtggtttggtctgcggcgctgcaggaggggcagatgctgccggaggttttgaggccggtgagtagggatgactggcagaagcatgaggtccaggtggaggcttcgcctgattcacaggaggtctgcgcgcttgtcagggtggtgcaagtcaggccgcattgcgggaatttgctggaggctgctgcggggaggatggtgtcggcggctaaggctgagattgtgaaggcgataagggcgaggaagaggaatgagaggcgcgtagtgagtgacatggtgagagtgatgttttcgagttctctattttaatgaggggtgagtagcgaatgtggaagtgagagccgtccctgaggctcgattagatgtctggataggatgtcttagtccattgttgcataggtgaaagagagaagagtcgcccgaaagaccaggaaaacgagacgaagatggttttgggtctagtcggggcccgaacgattccggattcggctttttggtctttttctttgattttttatggctctcgaggggaaatccgcgggtttgattggtcggatcggtttggttaatttcttttgcttctttaatctcttttaattaccttataaagtagtatcgtagtactgtagtactgtacctgtacatggcatcgcatgcgttttttaatttccgcaaacggaccgtggaaacctcacattctaccttgtcgcattctgacgtctgccaggtccgatattaggttaatgctcggctggttctcaaggttagtttctatggaatgagctattggcgctaactacttcctatgcaaggagtaactatatgtatattctgctgctgtacggagtacaatgtgcgatgtactcgaagtagttatataggatcgagttatttacttgcctattcccttctaatataatttactaacctgtaactcatccgtctttcattaactccaaacaagggcccaccacgatcggcagtcgatacttggaataatgcgatgaatctgcggttaatcgtacaggtacttagctagatacggagcagagaggtttcattgtctttgtggtatactgatcgtctcgttgaggcttgaaagatcagcactagggtgatattccaccgaaaaattctttaactgtatctagaatctaggaccagttattaggggctttattaccgaagggaaggactggcggtagaccttttaggtaatcgcgaatcctagttaactaactaactaactactcgataatctctgaggtaagggaattaccgagcctatattagaaaatatgaagaactacggtagtaaccctctcggactcactggcttatctggccctcttcaccttttgcacatttcttgctagtagaagaacgaggctgataaagagactatctacacgtttgtcaacaataccatagagaaggtcattgccgaggctaagagcgtcggagtcttcaatgaatatgtctatatgaactacgccagcatgtcccaggatgctgtcgctggatatggtgctgctaacaaggctcagctgaagaatattgccaagaagtacgaccccagggaggtctaccaaaagctgacacccttccaccttcacttcttagcagtcaccccatggtattctcctctctagcaccctactactcccagtgatgactctgctctcacacctgtttcgcaggcaggcatgtcggtgcccctgtcccccgcggcagggtcccctcttcagtattattatatacaggaggctaaatcttttttatctttttttcttaacttttacttttcttcctacatttaatcattcggttagatgcaatgatctgagtctgcatccagactcgcttgtaatcacggcagccatgtcctaaacactgcgggcttttagaagaagacaggctgatggtgtgtttattgcgcggatcggcgaacttttcacgacaggcccaagatcgtccgggattgaggggttgcgggtccggatgataagtcgctctgtgattcgctcgctctggatgtcgagaaatcgctcgggaatatgctcttatatactttgttaattccgacggatttaggagatatgtcgccgtcaaggttctattgtatatcataaaagggcttgtcaaatatagttatgaacccagactcttttagctgaatcatcctatcataaacaaaccctcaaaatggcaccgaagttcaccaaactccgccctttaggcaagaatggtcccctagtgccagccattggatatggtatgatggtcatgacgtctcctagctacggggcttcgcttgaagatgaccagcgtttggccctgcttgatcgtgcagtcgaaattggggcaaccttttgggacacggccgagtgagtattccgttcaaagtcatatcgttttaatgtctctgacaaagcaacagtatgtatggtgacaatgagaagcttttggctcaatggttcaaaaggtctgggaagcgcgaccagatctttcttgcatcaaaatttggatatgtcaaaggtagccatacgttggaaatcgacacatctgctgcctataccaagaaagcttgctactccaccttggagaacctaggcattgaatatttggacctttgtacgtgttgaactatgcaatctgcattcgatatatcataacttctccataatagctaacgcggccttagactatgtccacaacgtggataaagttactcctattgaagagaccatgcgcgctctcgtggaattacaggcgtaaggcaagccatacccccaatcaaaactaggtattgactgagcatttcagcgaaggcaagatcaagcacatcgggctatcggtagtttcctccagcactattcgccgggcggctaaaatagcccctattaccgcctaccaacccggctactcacttttcgagcgtctgatcgaaggccctgaaggaacccatgcactagccacgtgccgcgagctcgggattgcaatcgtgtgcgcgacgcctctgggccgaggcattctcacttccgggttcagtcagggtaaagcaattggtgccgaggcggatatacgtgagaagatgatgccgcagttccaggatggtgctaaagagcacaatgcggacttggcgaggcagatcaagattgttgccgacagaaagggatgcagcttgtctcaattggcgcttgcttggctacttaagcagggtgacgatatttttcccattcccggtactaagagaatcaagtatttagaggataatatgggggctctcgatgtcaatcttaccgatgaagaagaagcggagattagagcgctcgtggaaaagactcctgtggttggtagttcggttcccgatgcgtttaccgggatgctctttcgcgataccaaggaagaatgaattatttatatccagacatagaatctcatatagaaccacatgcgtcagagaatacactacaacatatgtatcaggtttcgattgagaacatataataggtcctagccacctctagcggacttattgatgtgtggttatactgtaagcccccgggttatttgtgatgtatggacaagttaggcgatctacgtaaagaggccaaattagaaaaacaagcaatagcaatctcagggctagtccgtgaggaaatctcggagatgattggataacagctccacctattattcctcccccgcattccctcccttctccaaccctcccatcataccgacaatgccgacaatgccaacaatgccctcccggcaactcctttcaaccctaataacctccctcaccaacacccgctggaccctaacccgaactctccggagcgaaaaccccctggatctaaacggcgagcttcgcgggaccgcaaccttcaccccccaaccccccaccaccacagccgaccgcgactggctgtattgcgaagaaggcgagatccctagcaatgtcggaggccccttaccagcgggactacgttggacaaagaagtacatatggcgcctaggcagcgacagcggacacgtcagcgtctggttcgtgaaagtcgcgtcgggcccggaagaagcagactacttattccacgacttcgactttgattcgggttcgagttcgccgctagggtcggaatctgggtctgcgcagaaggatcccggcgaattcgtcgcgccgcccgtgccgcccgctgtgtcaacccccggcaatgagatggagactactgtgcttaatgctaggggcaaccatctctgtatcaacgatatgtatcgcacggcatatgcgtttcgcattgagcctgataccggggaggtgcttagctgggctagtcggcatgttgtgcgcggcccgaagaaggggcaggatattgttaatcggtacgagaaggaggcatgagataagatttaaagtaacctacaattgtgatgcttctttcatgaggctacgcggatggtcgggttgcttggaacctggaatttcccgaggtctactgaaatcacgatcgtgatgatatgtctatggatgttcatatattcccacttatatctcgatctagctccgctcttcattccacgcccattccacccctgctcacagcgtgtaaaggaaatccggtcttttgtcacccaacaactcgatctggctctggtccaagccctcgatccagtggtcgcgttcgccacgtctgcgcttgccgttctcacgccgcagcaggaggtactgcaccacggatccgccaaagaggaacaggaccaggtaggcgagtactactccgtgaccggggtagtagtttggcttatcattatcgcggtagatgttcgatgatacgatgccgttgagatttccccagccgatgataaaccctagggagacacctcgtttgtatacacctagacagctcgagttagttttggctgtggtcattcatataagaaaaaaccggaatccaggttgaaattaccttcggtgttgttactagtccatgaaatcgtgttcgcaatggctgggtagatgcccatggccccgaggaaagttcctgcatatcgagcgccggcggacttacagcctagtagcatagcgaatccaatcataccgaggaacgagacggcgatattgcagaggccacgctgtcttgtacggtctgcaatgaagcctactgccactgtcaagacggcggcggcggcatatggcggtacactcagcaactgtgcacgaatcgcgctgtagcctatagaagcatccagtcagtaaatagctccgatataccgagcgcaagagccaagcttaatattcaccctaggaaatcttgttagcttcagaatctccaatgtggcgatgtgacaactcactaattcattgataatagtaggcacgaaaagcgagaacgcataaagcgacccatcagcccccatataaatcacagccccagtataagtcttccaatccttcagactcgaccagaagtactccatcttgaactcctcatgctcagcactcgactgctgatccatagcgagtcgcctgagcacgcgcttgcgatcgggatccgacaagaaccgcgcctgatcggggaagtcatagacacaccaaaatgaggcaataccaatgaagaacgtaagaaggccttccaggatgaaaatccacgaccagcctggcttgccggccacgccgtccatcttcgcaatcgctgctgctagcagaccaccaaatgaacctgcgagcgccgccgccgagaagaaaatcgccattcgtacgccgaattctgagcgcttataccagcatgagaggaaatagcccactcctgggaatagaccggcttccgataggcctaggaaccagcggactgccatcagcccgtggtagttctttacgaagcccatgaaggtcatgcaaattccctggaattggttagaagagtaatgtgttggaagaagggaagatttcacttacccatgccatcataatgagtgggataaatacgctcggccgcatccgctttaacaggacgttggtcgcgggctcgaagaccgagtacgagacgaaaaatatagtcagtgctgcattgtattgggcattcgtcatatttagatctgtttttagaccgacgagctttgcgttgccgatatttgtccttgagcgcggtgagattagtttgtgatatttcctcggaagccagtgcgcgaataagatattgctcttttgcttaccggtcaaggaacgagacgagatacagtagactgagccatggcacgaggcggatatcgagttgccatagtagtctacgatcctatacggttcgtgatctggttagttatcgtgactttacacgatgctgaacagaaattgataacatacaatcgccgctctttcttcgtcgctcaatcctgcgtcgggatcctcaaatccagctgcagcaagcgcatccttagaatcggaaatattctcagggtcctcggaccaggattcggtttgtttgtcggaggattcaacgaccatgatgcaagatcgagcagaggccgggggatggtcaggaatgtgcgattgctctacgccgaccggcgagctatttaagaagaacagggaacaggtcaaagcagaaaaagacagccaccaagcgctatgtaaagaggggcagacatgccaacgcttatgctcggcagatggtcgagatttgccagggtccagctgaaaatggtatgatccctacatcctagcccgcgtcctaaccgcgtacaggggttgctgcattagcttgaatctggatgttggggcccgttcaggcgtgatcggcatgtagaaagtgagatcatccgtggaggcgacttcaaacgggaagaaaaggacaagtatgtttgtacgccattgtacaatatctgattcagcttgatgttgagtcttgaatcccccattttagtacatttttgatacattggataaataggccaagtctgggcatccggggaaaattagggcatcccccgcataccccgggctccactaagcgaagctttgccccggggccgtctcgatctcatcaatgttggacacatgtacggagtcctgccaagtctataacggcccgtttatttaggccgacgcggagttttgcttggaaacctgcctacgatgtgcactcggccgagagaaataggtggtgtcggccgacgtagtcgtatgaaatgttgatcgccaaaagttccctcgactatcgagccattgaccgtgtagcctctcggatccaccacagatgaccaccttttgaccatgttttcattggacgtagtgaactcgggatagtggaaggattgtctcggcattgaccttgcggcaggttcctcctccgtagccccgaagaatttgtgccaatgatcatgcagctatatgataatatagaaagcgaattctaagaggtctgatttttcactgacagccacgctaagccccgcattcaatgtgcgcacggcttcactgacgttgcggggggtgatcgtcgcacacaaagttgcgtccgcagcgcagtagtacaacatcggcccaatttgatataccatgagctgcaataggcggctcatggaacaagcgctaacttaaaagacattgttggagcgaattcgggtggtcgaacctacgctgtcgaacttttggcaacatatttgtcgtatgaagctattttagaacgctcgttatgacttgtctccggagtttaacttggattttggtagtatcattttaatttgagttattgtgaggtctaaatgtagactcccaggaaaatttacataaggtcgagtcgggctcgcaagaaaattaccttgccggtaagaccaatggagaccccaaactcatggatgtatgtacttgtaaaaaacgcgataaccgagacgctcatgatcaatgcaatgcgcccattttgccttgatgtagccactccagggttaaacccgccttccatgaggcggatatgaggcagtcgattcggagcaagtgatagtattgttgcaatacgtccccaatctatgcgtttacaaaccgtcatctcgcttaatatcgcctggacgggattctggcttcatggggttaccaaatccattgacgcgtccatggagccacttgagggtaatggtgctcagtgccatgacagcggcactgagagtaaataggccaacacgacctgatgtgggcagtgcttcgaagatgggatatgggtacctagactgattagcgattgacgtcggaggtgctgggtcatacacgaaccatccgttctgggagaagcattgctcaatccagaaccagtagccgaaggcgatagtgccagacaatgcgagtgcagggagtgcagtgattgtccagggtggggataggagcagcaggtcaatcaacatcaccaccgacggtgttgcgtggaagctgatgtctagaaccatgttattaggggtatctcaaatgcactttttacagacgtaccggcatggacgggtataacaatatcttcgggaatcaccaaacgttcatcgatcttattttgattagaacattgtcgaattagcatcgaattacttactaaacgaagaccccagtacaaaacgctgatcacaacctcaaggggggcactacatgtcgataggatgtttttgaccaggaacagtcgccgggacaaggtaatatccgctagtagtgcaaccgcaaaagtgagtgttgacaacgatagaccaatcacggtcagatattgaaaatgccaaccatatgcttgattactgtcaaatataaagttcagcgtgctttccaatatcgaagctagacgggagcttacgctgggttagggttttcgtgcatgcttcaagaatgtcagcaagaactctaaaggacaacgtagcagacgacccatactatttgaatgaccacaaaaaactcgaaagtccggccaactagaaggcaagcccttagcgctgaaccgcgatgataagtgaaaggaccatggtacttacatgaaccaatgccgacaagccccgtgaaggactcgacatccattggagcgggtgcctatcgatcatagatttggccattttggaaaagaaattagggatacaagcgctctcaagtcctagttcaatgtcccccgaaaatgctatcagcgcgcagctcaaggaaccaatgtgcatccaaggaaccggatgctatgacgttggttcaagatacgagttcacgtgacacgcgggatcaatcggcgtctgtatcggattataacataacccggctgattcatcgttccttatctcccagggctcggctggccatgtgcttccccacacttttagtccgcgctccaaagataacctttgcctttcttctttacatcaaattgtgacttttattgcgaatctgtgctcttggcctgcccagtgaggtcagtcgactacctagtgggtcaatcgatcatattgaacagatccatcttctgtttgatatcttgtttcatcccccaaggtcgccaagaccggcactccactggttactaccggcttctcttgccttcccattgctgaagggcagtgggactggaactgtttctggcacgtctctcccatacctcgatgtgcttgtatactaggtgtgggtgtctggtcgattatcgcttcgtcgctacttggggtcaacgaggatcgaaacgcagaaagcgtgccaattctgacgtgctttcggcgtaaggagtctcgattggactgatacagacttgaaaagactgaatctgtatggccgcgggaaagtatatagtgacctttggctatttcgagccgttatcttgaattatcgccgtgtcctctttacaggcatcggtactcgaccagacaccctcgacgtgcaatgcctcgtcctagaagacctggtgcaccagaaccaaagcgccgaagtcgtaaaggatgttggtacgttactaagatgtcaataagctttaccaaggctaacagtctcattaggccatgcaaagcacgcaaggtaaaatggtaagaagcacaacccttgtatgatgctcgtgtagctaacaattatgtagtggtgaagagaaaccagcatgtcttaattgccagcgacaaggcgacccttgcgattatagtgtccgtctgaactggggaggaaggacgaaacgcatgtcaattgactcgccgaattcacaatctagtgggtatggaggagctgtaattggattttcggactcattcgctatcaacgatctgagcccagtttcgttccccactccagcaagcaacaaccctgcagatggatttatcaacactcatcccggggagttgacttcgccaagagcaatatctccaagtacatcatcacaaatgggacttttcgaatcccccaggctcggctcggactctgaaggagtgctatcgccgggccaattagagtctcgattctcctcaacttgggcggaacaatctcctccattgaccgcatcggctacctcggcgcctttgttgcaatatcaatttggacagcatagttttgatagcccatcatatctgggttcgatagatcagacatccggcctcagatcactgtctgcctttgcattccatacaaaccccgtgtcgcagccagtctcatacatgcgccaccctgtagatgtttccaaccactgctcgggtccatctatctcgcactctcgtgatgaagagcatctttctcaagggtcatatgatgaccggggcatgcatcttggcgctcggtctaggacagggcaaaacagatcctcaaacagcccgcaggatactaccggtcttatgcttttcgatccacgcagagtgtcgattgctgaaagtgatgcaatctcgtctccgaggctccacgagacaaccagcaacatgggctctgtacatgactatcacaatgggttgactccggatcatcaggcatcggcggagagcaatcatgaagccgatcaaacatcccacgagtcttcaatcgcccggagcaaatggcaaacatatctgaatagtgtaaccgacaattatggattggattctgggcgccctgatcaggatctgaccttcaacaacgaccatgccgccatagatatcaattatgcgttagacctgatcagttctcggtggcgcaacgaggagtccaaagcctctcaacctgaccccgtaccacaggtccagttttgtagtggttactatgcttcgccagtacccatcaatgtcccgaggtacttatctccgcttccgtcgtcgctgctggagaaccccatcaatctgatgtacttccatcatttcttgaatcacactgctcgaatgcttgtcccacacaactgcgataataatccgtttatttcggttttgccatcaagtgagttataccactctatgttctgttatccttcagaaagctaaccgaacagtggcaatcggtgattccaatctcctcaatttgctgcttgcatactccgctagtcatcgtgctcgctacctcggtcatcccgagcccgccaatcgaatcgctcattgggttagcaaggtcttcccaacattgcgtatggcattggagtcatccaaggaagacatcactgacagccacttggccacggccattatgctgttgtcattgaagatcgtttctccaaggacattcgaggtgccgatcacctggaagagtcacctcaagcttgctcgcgatttgttccttgcacgaagcgagggaatggcgcatcccgggaacaggattggagcgttcttcgcccgctggctaggctatctcgacacgatgggatctttgtcatgtcgccaagctggtcctccactaatgatataccactccatcttaacggcctgctccgcgcctgacggtcatgacgaattcggtgttgattgcttcactgggttcaccccccgcactggagtatttctgatccgtcttgcacagctggtgcaggaatgtgacaatcaactcttcgacgaaatgggtaatttccggcatgactggcatgcatctgcggaaatggtcctggaagcgcaatctgtacttggtgttgtcgatgggattagcgaacgtgctcatactagcccggaacatcatcatggtgttgagtcctcggatatgatagccatcgaggaagctttccggtttgcaggtctcctgcatctccatcgtcgtgtccttgggtctccgcgtgactcgtttcccgtgaaggaggttttgcgcaagctgattgatgcccttggacgtatgcgccctggtgcagctactgaagtctgctccttgttcccgctcttcacggctggttgcgaatctagagatccagttcaaaggtctcagcttttggaccggttctttgtattggagagttcgggcatgaaacaggtacgcttctatactagtctgaaattcgttgaaagagtttgctgacactgtattcactagattcaaaatgcacgtcaattgatgcaacactgctgggatgaagacctgccttgggtggccctagctagcggtcagttcctaggttagagtcgctttcggtttgaacaagtgggtggactacgttgattcgcagacgccatgtgctcatgtctggcaatgacctgagctgggatgaagcattatttagtatgaagatgtgatagattaataatacccctcgccttctaaaagagcgagatacctaccgtgcgatgcacttcatcgtttgccgtttggcggattatcctacaccttccggccttccactatatataaacgttactatcctcttcttgtgccggaaatgaatcataatgttcattctacaactgactagcttcttgcattacacaagccagaagtcgaaattgcacagagcaattagttctaacttaacttatatccctaggatatcaaatagactacagtattgtccgatatatgccaagatcgaaatctacgactccgcagcggggtgatggtgatcccccagcttctccacaccaagccagttcagccgcggcttacaatgtaggctctgttgaagaatatagccggagatggtgtataagagtgcgcacttaagatcactatatctcttgagcaagaacggtatacttcccaatagccatcatgatctccgatcccagccccattgagcttccatcttcttacgaaaaggttgaaacaaccggccatgttgttgtctctcactaccccccaggcacgccggcagtgaccccagttgtcatcgttactctgaatcgtcctgctaaacataatgcgttcaccccgcaaatggtcttggacttcgagaggctcttccccatgttcgatgtcgacgagcgcgtgaaagttgtcatcctgacaggcgcgggaaagacattttgcgctggtgcagaccttgatattggtttcggtggtggtaaaggcaggacggtagaccatcgtgatgggtaagaggacatccaccagacagcccgccgcatgctctatactcttgctaaaaaaaccccccgacacagcggtggaagagtctcactggcaatccatagatgccgcaagcccacaattgcagcaatgcaaggctcagccgtcggagtcgggatgaccatgacccttccagcaatcatccggtagatcaaccacatcccgaaaacgattccagaccccttttatttaacatacatcccttctaggattggctatgaaaaaggaaaatacggcttcgtcttcgcccgccgaggtataactctagagtcatgctcttcgtacttcctcccccgtctagtcggttactccaatgccagctacctcgtcagcacgggggcagtcttcccccctacatccaagcactttggcgacctcttcaatgagatcctccccgagccatcgcaggtcctgccgcgcgctctcgagctagccactgatattgctgagaatgtgagcccagcttcgtcgtatctcaatcgggcgcttatgtggcgcgactctggttcggcggaggctgctcatctcgtcgagtcgcgagtcatcaaccatatgtttggatcggagtaagtgagatatatatgaacaagctggttgcggatacttaatatcagacagagaccagaaggagggtgttgcggcgttctttgggaagcgaaagccgaacttcaaggctaaccttgatgataacccgccgccgagtgtgccgtggtggacagaggttgatactggccgtaggcctaaagcccaaaggccttcgaagctttaaatccaaagctgtcattggaaaggtaaataatgactgaggatagcgctttcagggttcgtttaattcacacaagaccttcgaaggatggaagtctcaacaaatgtcacgaaaaatagctataaattgaccgtgttatcaaaggtcgttcctaatacattgcaattccccagctaccaagaccgctaatgatattgtaacaaaataaacaccagcccggacaaaaaaaaaagtcaccagatgtggttttgaacagaagctccaagaggttccaccatatattgacacgaacaaaaaagaaatgctgcaatatcacaagagcgaaaagagagaaagaaagagtctacgcaatgaagttgcggcgcttgcggttgtatgccctctgatctttcagccagtttcggtagcccgccacgctaccaatcttctcgccgtagtaatcgggaacagggttggcgatggagttggttgatggatcaacacggaaccggcgaatacgatcaaagaactctttctctttctgcgcaacgaaaacaaaacacattagcacagaccagacataagtcgccactcgtttgctttgcaatgactcaccgtgttgacagagggcttgtacttcctgtacacaagtccccaaatcccatttccgagagccggtcccagaagccaaccgacagcaccgcatgcagcggtcgccaatcccaggacaacaaatgggtcgaggcccataactgtggcgccgagatgttcaaggtcctggccagacagaatctgcacaccgacagtggtgctgatagcagagctggcaactgaggagacgagagagtatcggcggcgggaagcgcggagcttgaagaaggtgtcccagtcgagcttgacttcgtcgttggcaggtgttgaggtcgaatttgcgcgcacagcaatggttgatggcaacgcagccttggcttgtggccggaagtctaggttcaatgttgcggcggccgggcgagttgtcgtggagctaagacgtgtgggctgtttggccatccgggcagttgtctggggaaggggacggagggcgctggcgagcgagggcgcagcggggtttagtcggccaaagaacatggctgtgcggatggacatgctgataggattggcgttcattttggggaggaattggaattgatctaattgcagattccttgcagaggtgaagtgagaattggagccctggccctggaggtggagccgggttatgtaagcgtaatgggcccgcctaagggcgaccgacatcatcacgatctgatctatcatctgttaaactacttgcagtagatggagattataatgggccaagattacaggagagaaattgaggacgaagagaaagattgattcttcaaaacacaatgagctatttatagccatttgaggcccggtatgtcaagtattcttcgaggctaaatatcctgtttgacagaacgcagaatcatggcagttattggtttgatgagaccaaaattgtcgaatcacggcagagcaaattggcctcccactcaaagaggagataatagctgatgtagggtatcgcactctgattgagattcgagctttttgagcctcaaagcaccacatcgaagaaacactatcgcaatgtcacttgtccctggttcaagttggatgcagcatcatgtcaagtcactagtgaggtgtagtgaataggtagccagacgatattgacgaggcgcccgagaggcaggtcagtaggctatatgcatattctttgaagatgtcgggtgtataaggtaatataggcagtgcgatatataagtgtacttttgacccggggactggcaaagagatgctatctatatttgatggttacaaagaggagtggacaggtcggagtttcacaatccacctagaaggcttagcttggtttatatacaccggttaacacaggcctagttcatgaggcagaaatggtgaacaaataagagaatgagaccatttttgtccctgaacctggaaaagaccggaagtgttgaactgtaaacaatacatggactgcttttaccaggctatagtcttttaatggccagggcatgtgtcagaatgggccgtctgccagcttggcttctactgttatattcacggaatggtgtgaaggctggtcgtccactggtcaggttgtggcgagcatatcagaattccaatcatggccagctttattccaccgagtcaatataagtctattttcctattcgattagagttctccccggatcgacatagtaagaggctgaaatggtgcgcagctcgtttaccgaatacgttatagattcagctgaataaaggtagataaggaggagagaaagaggaggagaagaaaaggaaaagagaagaaagaggggggaaggtatcacctcggcaacggatatttactcacgcgttagtcaaagggttcgtccggcgtactggttattccgtgctgaaagctttacaatacactgtatcctggggcctgaaagcggtcagtgttaaggctaacattaggccaaattaaggccaaattcaggtactaaggccacaatatactacattaaatccgaaagtaaccctggcacctatgcccctgggtagtctgggtatactccattgtaaaatattcagcaaaacccgtggaaaaatcctttgttcctggttgcacacgctaatgcagactaatggtctgagagtgttttcgtttgaccaatagccgaaatgcctcagcgatcgggctagcggcggggtttcctgcccaggtgccaatagggctgttaaaatcacttgaaatttaaaaatatcgtttcaatttcaatttcaacgctaaaatattatttcatttcaaaatcggtctatgcctcaggcatggacccactcttagtagtccaccaattagataccttaatttttcagagagccaataagattatcatagcttactctaagcctaattaggccgaatacaggctcttacctacaccgcctagtattcttcttagaccgcctacgcttatgtagcgctagtccgctagaccacgtagagtgcaatgtataggtcaaaaatatatctctggtaatctaggtaagaaaatgctccctgtagcccctatatccggccaccccgtcctacttcaggcactcttatacaaggccgaactatataccgacgacatctaattatcctaccctatatctatagaagacttacagtcaaagagtcgctctgagtaccactatcgccagtaccaccatcgctagtactaccatcgctaacactactatcgctagccctactaccgccagtaccacttcccttactactatcggtactaccggtaggactatagggactattattattatcattactctagtcgtcactcttactatcttaatggtttagcgggtttgtaaagggactgtgtcgctatacgcgaggactagcctctgaataatctatagggcggtatacacagtagaatttccttccctattgttacctaaagcgggtattacagctagcgatacctttaagtcggtcatagaaccagtctactgaggtatagttacctctatagctaggcttaagcgcgaaacgcagtcgatgctattgcctcgaaatcactaggcgtataatcgcattcttacctataacgattctactgtattcccttcggcctatcgttagtagctcgaagtacccagtatagaaggtccggaaatgccgatatatagcggataggttattgtatactatactatatatcatatcgctatcgctagtaataaccgggcagataccctagttaactttattctatttaagtattgggttcggcggtctattactagaagtaagggtaagcctaagctctctagataagactttaggcggacgttatcctacgcctaggcggagttagtagacggctagcttctaacctaggttagggtcttatactaggcctatatatattcagtatatattaggaagatataaggtttttgacttactataggtgtatccctatactggataagggtttacagcattccagactttatttgaagtaaacgcgcgataggaatagctatcggtagactagaagactagaagggctactatttttataaagataagatatacttaaacttaaagactaagaaaattttagaggacttagaggatagagattctagagtagaaaggagagggtttataactattctattaataaagaagtattccttctacccttctaagggtatttaggaatatcgctttctattaccttcctaataaagaagaggtctatatagaattctttagttctttagttctttcttatatataatactaatattataaagatactcctataataagaatctccctttattactatctaaccgtttttagactattagttataagcgactgtactaggatatttttataaaggagagttagaataatattaataacttttctaataggttgatctctaggtttaggataaagtactttaggtatcttagcgcgaagatactttatagaatacttagaggatagagtggttagtattttttattttttccttatagcctaggtcctacagttaggtagctaactctacccctaattctattatagatctaggttaaatataacttctactctgtatcctattctagaaatactatataaattatcgactatctaaggggaaagtataagtaaatccctactgagatccgtataatctttattaaagaaatgaagaaaggtaaaatagcttaaggacctattagcttttaaggttagggcagctatagccttaggaaataaagggataacgctctagctagatagctttactagtctagctagctattcttacttatagataacccgggcttctaggaattctatttacttatagatagtacttataagctacctactcgctaagctatcggtactaaactcctcgataaacagtttattagcctttagaataaggttaatataagattaaagataatacagtacctcaatcttacctataataagtcgaccgataaaagtagataccgaatctttaatatcttattcagttctcggtcctatagtatctattactatagagtcgagattaaggatataagtataataggggaggaagttactagcctagtctttaagaaggtataggaatacctaatctaagaaggtaataggttacctaattagttctatattaactctctagctatagatatatacaaggtaatgaatgtctactaccgactactcggaatataacctaagataagttatatattttatatcctatataacttgtacagcttccagctccttctaaaggatatcctcctgagaagtgggattaaaagtacatttaagatagtatcagagattgtattattctttaactcagtacctctacaactaaatcgacttcggaaacactaggtcgaaatctactataagacgtccgcgctcctagtgtctataataatacaatagggctcgcaatttaagatactccgcttagttcttaaatgccggtaggccctcgagcgctaggcccttaatattaaaaaggacgataggggtagagggaaaaaagccttaattgcctctaccctattagaacctaccttttaggcggatctcgataagttaatccaactcctagagctaatctataaggcacagcttatatccgaaagctaggtatccgatcttataaaagtaagtctattatatacaaagtctatatataatatatacgaagtctatgtataatatatataaagtatatataaaacctttattagcctttattctaataaagataggttatttcttaatagattttaatccaggagtaccttaagacctatatattaatgtcgaaatttcgactaattatataggaatacctagaggataaaagcctaaatggatttaaacatcgatttaaccgataaattaagccaatctactggcttacattttatcttcggctatcgacagctatctaggatctatcctttcccccggtactttaagagccaataaatacacttatcttaaagtataggggagagcctactaaaaagcagttctagcaattttagaactggtaatagcgttttttccatgctgataacggtggtatctagtctaaccaggacctagaggacttctagtataaggcgaaagtattcgctccttagcttactaatcttgccttacgtatctataatactacggctaatttagttgcctcggagtgggcattttccgctataaactttgtttactcgaaggtacgcaattcgctttcacccaagaaggttgataagctagtctatctccggataaactatcgacttatgagtaaagggcctatccagcagcctgacccagaaaaggtataggattagatagaccggtttgatgaggagtagattatcagaaatcgcttcttccgggatatgacttctcttaagcctcagactgaaagccttagtctaggaaatgagctttctgactctgagtctactgatgggggtaggtgtattataatgagtgtaaagcgtccttatgacttgtgtaactaaaaatttactgccagtttttctgccttttttttctgcctatcagctagtaatacctttaaatcggttatagaaccagcctactgaggtatagttacctctacagctaggcttaagcgcgaaacgcagtcgatgctattaccttaaaatcactaggtatataatcgtattcttacctgtaagataaggagtagattattagaaatcgcttcttctaggatatgacttctcttaagccttagactgaaagccttagtctaggaaatgagctttctgactctgagtctactaataggggtaggtatattataataagtgtaaagcgtccttataacttgtgtaactaaaaatttactgctagtttttctgccttttttttctgcttatattacaaaacattaccaatatattactagcgccttagcgtgaaacaattgaaattatattttaaatttcatgaaaattaaaaatataatttcaattcaagattttgaaattcaatttaacagccctaggctgaaaggcgttaaagaccgaacagactctgacctcattggcttagcgcggaaataagtgcagatatatatatgagcttatagatagagcatatagaatatagaactttggagtataaaatacatagacatcggatattggatagagataactaacaacataccctattaggtacgcgaaaaaaaaaaagtctgtcgtcatttggctaattgcgaatttctccccaccacagcttccttttccccgtctcgacttgccgcattcgaacttccccaattccccaactcaccaattttatcctcttattccgtctacaccatgtcaaggaacatttcttacggccgcggaggcgcaggtaagtgacaccacccttcatctctcgccacacaagtccactaaccacactacgcccatgccctaggcaacataacccgggaacaaaaagcgcccgaacccaaagacttcatcacaccaacaatcaagcaagaagtctacacgacaggtcgcggcggctcgggaaacatggtacacaacgatccggagcgaccagagattgcgcgcgagagccaagacgttgagtcaccgcccctgcgcgctcagcagatcccccaccacacaggccgaggtatgttctgcagatgacagtatatggagcgaatgcatttttgcaaggtcgtgacaggtacagctccgctaacggatgtgctatttctttccataggtggcgcggcaaacgcttacatccccacccctgaagaggaagagcgcgagaagaagatccaggagcaggaggcggagcttattcgcgtgcgcacgcagtccaaggaccgtgttagggagatcggacaggagaggcaggagctgcggaaggagtcgccttcttcttaggttggttaccgggggtggactttggttcgcggttgattcgttctcgttaagagggctcgatgaaagctgatggtattggctgcggaggagatttgcctttcttgggctgcagtgccgatctggtaagaggtgatttgtccgagcagaaacgaatcagaaccactgcgggcagtgctgcttcgatgcgagggtctgtttttttgccccatcgacctaccggttggacttatgggtctgtggtatttgcttttctttcttttcttttcttttctttgcgcggctttcccaatcggctttcccggcttcacataatagggaattgcttcatcatacctatcgtggaataccgggagaggaacggcgcttgggatacatttgggcgggttgtgttttccctctttgacatacgtttcgatgtgtattgcaacgatcctctgtgtttttcggaattgcttcctaaacaccgagaaatgataaactcccatgacaagcgatccttgcctcaattgaagaaactatgctatgtacaccaaatgtttatgctaattatacgcttcgtgtctcattagatgcatcgctcagcccaaccaagcctttgaaagagggcaccaaagaataaaattgcagactcgccatcaacagctaagcgagcactcgcgcgtcaatcctcggaaggaaacaccccgtcgcatcaatcggccagtttataagatcttgccagttcggatcaagaatgtccccaatctcctgcagaatcctatttccccaatcgcccatccaccatgaactcctaagattatgcagaataaccacataatgcgccagaacaacaagcgcaaacggccggcgcaactcgagtagctccagaaactccgcagggatacggaaactccaccaaaacgcaaagaccttgggctcgccgcccttcatcagcagcccgagcgcgtggctgagatgttcaatggccgagtcatacagatccgtctcgtgcgtcacatcccgcatagcctccaagttattctgtcgctgtagcgagaggatcactagccgcgacatgtccggcattgttgggagcgggtcttcggggtggaagagcgggtccagctcgctcgccgtgatgcgttccatcgaggccactaggatgctgactagccaccgggtcagctggaatacctcgaagaactcatccagcacgtcgggctggtcttcgtccgagtcggtttcgctgtcgatctggcagaagccgaaggtgaatacaatcattatgcaacacagtgcgaaggtcgcttggatttcttcttccggggcgtcttcggcactctcgatgccgaggcctgctagcgcctgcgcttggtacgagcgtgctgtttcaagatatcgccagcgccgggaagatgtactggttgaggcgaggtgcagtgccgagagggctaggataccttggcgaaggcctgtgtagcggagagaaagctgggggatagttgtttgccatattcgttcggaggtggggttcccagccatggatttgtaggttgttgtgcaccagtgcatcatcaattcgaggtctttcaggtgaagggtttcttcggtgtgggttgagagacatggtgggtgctcttgtggctgggaatttgactgtgaggttgaggaagtcggagatgatggcgaagtgctagttgaggggataaaagagccacgcttgttgtctagccgagtcagtcggggccgaggcggatattggctgagcatcttgcgatccaggcagtgcacacaggtcgagctctgctccttatactgtgagagttgcattagcggggaggtgcgagagataggaaacaaaggagaaactggacgctccagtctcattatcaattgaaagctctgagaaaggcccagaagccctaagcaggggtatcatactttaacgcgtcggtcactttgcatactcgtctggcgtcgcttatttgaccaggaggatttcgattcgcataattgcattgtaaaggtgccaggctcgagacctcgaatgtttattcgattcgggggttgctgtgtatttgactcataattcaacctccagggatcccccgaaggaggaggaagaaggattttctgagatcatgaaaaagtcatatcagtcataggcccaagcggtgggtgtcgatattttgatatgtccattttcagtgccaagtcggcattccaagcaccaaagaggtaaaagtggcgttgtttcctaaatcggtaaatgcaggatggctcgtgcttcaaatgacataatcatacccggcgggggccgtacttcgtcactccgatggatttggtatgtttaggagtacggactactacagagtacatattgcttaataaataattgagcacatagttagttagcaactaactacctaagtaatcagctcttgtatccaacattggaacctaggtccgatccctattgccaactcaaaactaacttccgatcttctcgtattccatattccaaaccgggtgtgaaaattactaatgcgcgatatacccgagactctatcctagaagagcatacgcaagctagatcccgctagatgcactactagcagcattttaatatggaaaaataaacgaaagacctcggacaaaccccactaagccccaccagcccctagaaagagtccacactagaccctcttcgggactagccctatggggccggccaagtctatccgaaataagtttcagttgacaagcgatgcttttccccgatcggggaaagcgcatgcgcttgaacccctgtcccatgcactttatgcatggacacaatctcgggtacgtatctttctagctcgtgatctctccatgccctaagctcctttccgattagcaccgtttcgccgtggctccttggacggctggtttcttctttgggaacgggaacgctgtccaggattggttgtcgcaagtcatttccatagtcggacaattcctgaatggaagcattgcaagggttagattgtattcgtcgatcggatttgctttgcttttactgattacagtcaatggagccctttaaggtgattactgcgccacttcctaggccccgagatgctagctcgcacgcaatctggccctgtcgggctgatttgcgatccgcttagccgcgaagcattttctttgtttgggcttggggaccctgccgactggggttgctttagcgttgttgagtaaatggcgtgatgatcatgattcttgctgttgactgaactcggagacgcgcatggctagcgtagaccgacttttgggatttgacttcggcgtcccgactcgggtttaatgattacgaaattccccggattcacgctagtcgttgtggatctcctcgggtttatcaagcgagcagttgttgtgtccgaacactaatagattgggcatttgacaagtgactcctaatgtagtagcccgcatttcgcgctgataactacagtccgccaataagcgcattctgctgtccgggtggcgtcgatcttagggtgctgagtgccagttcatcggtattctagatctgaccgaggacacgatgtgatgccacgtcgaatgtcatctggcactgaccctttttggtaactgcgcgaggtccgcacgggtagaagcaatagtagctgcattagaacaagggtccagttagctagccggatagccggtgactccgacggacgattcgatatctccgtttcagaaatcgattatctgatcgcttaggcttactgcaatgtgcgaaacagaagcggaactccgcggagtgatgtgatcgccaaatcctgcacataatccccatccctggtgataacacttttagggaaattcccggcgattaccacttggttgcctgccaaggtgaggggggtgatccctgcttccttgtttttgcgttgatatcgaaccccaggcctcactttccgacctgagacttgagagatactggtcctgatgataccagcagtgccacttgatgtgtttggcatgctgcaggacaaaaggcgtaattcatagggttcgtgcatccttccgctcaaatttgtatcaagtgtcattggtctgcacaccgatgttgggctggatactgcgagattgaagtacggtggcggtctggccagcagacacattttcatatccttgggttcttcgcagtggcttttcgacggggcgtatatgtgtatcatttttaggtgtatacgtgccaggtctctaccactgagaatggtaattcggagggcatatttctgatacactgcacaccatcatgactgagattgctgttggtaccacctgaaaccctgagtcgaaaaagtgcaaaatcatctgggggcagacaggtgtaatagtatcgtaagcggaaacaaactaacaggttagcagcatttctcaaatcatccgaagggtaggtacagtatgaaatttggatttgtggctgatgtcttgctatagatcgcaacgtcggggcgaccaatatagaccagccgatcgtcgaggccgtagctccaggctgtttgttagaggaatcagaggaaagataaagggtagtgttggccagttcgtgccgtaatagttgccatacggttggccgtgtaacacaacttggctgacgcctcccgcgatggcacgatcgactgacaaagatgcctcgggggaaagtcgtgtgacttcactccaatatcacgacgtctattttaggaaataacccaccttcatgcgagattttggcccggggaattggcgatggtcttcagagcgcttctatcggggagcgagggcatcgacatcgacgataggatcacatataagactaaagactgctgccaatgccaatgagaatagtaatataaaatccctactaaggccaagaactagcccggcgaaagcctaacgtgggcctactacggaaagagcacgactacaacatctgctcctatccaaagtccccatcgagcggcacgcccgcttacttgcgaacagttgaggccagccgtgcgctgtaggattatgttgccgctcttctagaggcagttctttgccgagcgaaggatgacctgtggtttgggtagcttgcgctggcctcacgcacggcgtacctcttgaagatgacgtcgctgcctgcgtactcgaggacaggtcgatgagcatttcgacatacccaggtttaaagtgtagaaaaaacgtcggattgttgtcttagatctatagctgattctcacatgacccgaccgcaatattactgcatctcctttgacagttcagaggtcatgcgtgaatccgaccactttagtcaaatacacttggcgtgcgagtcggttagatgatagactgccattagcgatgaagctttgctaataggccggtagctgtggagagtaagcccccagtcgggggtcgggtggcgcagaagaagccccacaaggattggccattggcatttgcaactgcagtatgttgtagtattgtacaatgttgtctgtgtggacatcaccttgagatggaagcctcgtacctttcgtggagtgactactgaatcggccgcttatcccagctatgatcgataccagagtagatctcaattggactcgagtacctgcagcgactgtcacggtaatgccgacgactgatacaggtagttttgggtgagatggggtgtccacgacttggctgagacggtgaagatggaatggaggtgtaggaggttggtgacggtgctgagttgggtaccactccggggaacgtgcacgccaacagattaaacgccacacgtcgacacgagcagacagaattgaatcattgcttaggattagttctgttggtcaattgattctgatctagactcaaggagatagcagaaagatcatcgaggtatagtcggagtataaaataaaaaataatctcctggcgtctatttgtagttccgagagaatatctggccactgtcgaggtcatcagagtatgtacttttctaaatatctattcgctttatactagttattccaacatttattatgttccaaggtcaaaagttccaaggtcaaatgttcaaagtcgaaaatttccgtttgcgggttatatgaagaattccgaatgcggactcaaatttcgtcccattcgtcagttgtaacccgacggtttgggtggttcctgcagacaacttgtaacctcgtcgacacctcgaggacatctcttttttgtcttctttttctcttcggtcttcgcttggaaatacttttccagtttcctatttccggtacgtgatatatgggatatgtgtgagccgtggaagcctcagcgaatctcccgcactttgacagcgtcatcgtgcggttgacccaagaaagaagtcttatagaagaagatgatgctaacatatcttctgtcaaagaacaccccaggactctaatatcgccactcccgccctcctccgagttcattctacggttcgcgaataaaactctccgactctttcgcttcgcattttctgcctgcaatcggattcttcacgctttggactgatcggcttggatcggtcttggtacaatcttggtacaaagttcattcaacagacccgctgcgttctcgcgccatttctttgttcagccccggaagtcgatgcttcaagtgtgacgtctgaacatcccgcggggtcgcatgtcgcatctccaaccccccacctctcttctcgaacaaccaggtagtgaagatctatcaaaatagacctataaccccaggaacacgtctttggtctatcaagaatcatcctcggttccttacaatccggtaccatgtacgccgtcgaggatagacatcatcccgtcccagctccgctctcaatggatcgcatctctgctccgaccgtccagtacccgtcaggatccaactcgctgcgccaatccgaccatttggcacccgtgacaaactaccaagatggtcgttcctggtcattacaagtggtgcagcagccgatccgggctcgcatgtgtggatttggcgacaaggtgggtgatttttccgacataattattttaccacctcttaacacacttccaggaccggagacccatcactccaccgccgtgcattcggctcattgtgcgcgatgcgcaaaccgacaaggaaatcgatatcaagtatgtcgaaccagcaactctgcacccctcggctttctaaccatctcctctagtgagatcgatacctcattctacgtgctcaccgtcgacctgtggaatgccgacggtaccaacgaagtaaacctcgtcaagcattccgccacctccccctccatctctaccgccatgtcctcctcataccctcccccgcctcagagtgtctctccgacctacccgggctacaaccagaaccagtaccctgtgggataccccccgcagatgaacaactactacggtggtcagcaggtggcctaccaaaatcaatacggccagccagtaacgtacccccaatactactccggtggtcaaatgccaccgtccatgtcgcccgctgcgcagccggtctctggtggaggtggaccgggtggcatgttcactcgcaatctgatcggaagcctcagcgccagtgctttccggttgacagacccagacaacaaaatcggtgtgtggtttatcttgcaggatttgagtgtgcggacagaaggcactttccggtaagtctggaataacgggggtcacacgacctaatcgctaatcaaaatccagtctgaaaatgagcttcgttgacgtgggtacctcgtctgccgaaactaccaacggtcccccggtcatcaatcacggaaccgcacccgttctagcctcggtgttctccgaacccttccaggtcttctccgccaagaagttccccggtgttattgagagcacccagctcagcaagtgctttgcgctacagggtatcaagatccccattcgcaaggatggagtaaagggcccccgccgaggtggagatggagacgacgatgatgaaggcgactattaaaagagcgatatttgatccatagtacttggctcaacgtattgtctcacctttccttacctttactttttccccgccttgctatgaatacgacatgggggatggtggcgcgtggcttacggtgttctgggcaagactcgggcttgcaggtttctatattgctacacggactggtgctggggggttttctgtttggttttgtttcttccgagtattattcttccccttattcttttgttggcctctggctgtgtctattcatatccttcgcggccgattgcccgcacgtacatacactttttcttttcggtgaatcgaggtccggttgaattgctgaatgccgagactgtctgcccatagaaaaaaaagtcgtttgatatccaatacactgaggttgtttagttatttgtccgggtattgctctaatactcgcctttggtatcaacaggtgtaggtggtttctgtggatcgtagccttgtctcacatggcgttgtataagagtatagtatacatccaatagttgtgggtcaaaatactatatccattcaacatatctcaggtttcagtctcagtctcatgatgctctacagtctaaaatgtctatttccactcaatacttgaatatcaataatatccactacccagtataacctaccatatctcacatgtcttacatgtcatcaaaacagcatgcaatcatcaagaatcatcagcttacccacccatcttccatcaaattctagaagacaaccagcacatcttacacagcacatgatccacaaaggacagcgtagtacaacaaacccatatccgacaacaatctcgacaattcccgcccaccatcggcttacagaatacgtcacaccgtccctgaaagccgaaatacaccggacctgacagaaacccgacaacaccggattgtccaacccgagtctcccaagccatacaccaacctcaacctcaacgaactccctacgtcggacagtgtacaacgcccgtgaaacggaccgacctaagccctctcctgacagattctaatcacccacagccaggaaatcctgacagccctctgcactgcatggtatctgcaaggtaccacactaacacacgaggtctcgggtatgcgcgctgcagcatcgttagatattcttattagatcgcagctggcaggcacaagaccggatttgcatcagggtcttcgatattgccagattagccgcagcaccggcttagtgggctgcagggtccggtgagacattgcatattgctgcaggttcgccggtttaggttgggcgtcggtggcgttggacggtgtgtggttatcctctcggaaacgaggttcctagaattttcttgggaatttgtggatgcgctgatgtatcgggccgttggtgggtcgagggttgtttttctggggaaagtaagaggcgaggtatccatgacgatgaatgagatattagaggggtttgaagaacgaataacgtatgatgtagaggtccttcgtataatatttgcgggttaagccgaccgttgatacctcattggcatggtgatgtggtgattccaattataaactgagacaaaagaagagatcttcacccgaactccccgattcctccaaggttggaatgcagcagataagtatagagtacctgatgtctcagactccatgagaccccgccacctctcggccaaacccgacagtcaatgacggagaagtcccttgatctatgggtttccctggttcggtttctcggatgtgctgctatttatattgccctcccctcgtctatataaagaaaggtacaccctcccttgattgtgactattcaaatcaaaacaaaacatctgttcagctatacaaaacaacctccaaccctccaaccctcaacatccaatccacaatgaagttcacactcacttccctggcactccctctgctggccgccgcggcaccagttacccagtcaactgccaacccacccttcagcgtgatgtccatccgctccggctcgcccatccactacctacagctgaacgccgccggtcagaagttctacctcggcggaagcacggccacctactgcccaacccaggtcacagactgcccaccgggaaaccaaaccgtcctcgctcctggcggcaccgctctggtaagtcacgagttacactatctcatgccaacaaacgtacaaaggaaaaccccctctaacaatgaacaggacaccatggtccccggcggccagcaggtctacatcgatcccaatggcgccctgagcttcacccaggctcactcagccaacatcccgcagggatccttgctcggtccattccactactctgccgatgaaccctgggctcattactccttcggctctactggtttcatggcttgtccagcggaagataaccgctggcaggtgtttgccgccattcaaaatgcgactgtgcccaatggtaatgttgacgagtgtcttgggttctcggctgtcgctctggattacactggggacgtgcctgcttggcagtatatctagattaatgatgtggtggatgcttaatgctctctctaccttgttttgatttcttgcatgtaccattattgactccttctttatcatggtccaggttggatttaataatctaataatctatctcatgcctttcgagttcagaggttgaatggtaaacatttgcatgaagctgtacttcgacacccgccgtaacgggccgaatcgcttcaggaacacccgtacacaaaatctatagtcagactcgaaagtaagttcaagttgatgggattgtgaaagaagtgtaacacttgtctcactttatcttaagctactaggatagaacaaagaatatatcacaagagaagggattgttacaggacccactacaggatacctacaatttgtatataaaccgctaacaaagttaagtcacttttatcacatcaactatttcaacaactatttcaaaaactactccatcatcatcgagagatctttgtttgctagatagctaagcgcgaaggttcgaggtttggaacgtttgcaaagggccagctatataaacaggctgcttcccactttgcaacttccttcttcttcctttcttcatctccattatctcgttagcggcgactttctgctcgccgtgaggcgccatatcgatcaacaagaaagagtaccttcaactaaggcggcttcgctattcttgaggaactgcgcaaaatggatgaatgctgcgatgacagataagatagagaactcaaattaaacaaccaaaaaatcgaagccttccgacagggccatctggatctccgtcaaagggccatctcaacatgggcacgggatgcattgcagaagaataccgaacgactgaaggaagagattcgcagactcaataaggatatcgtccacggtagcgatatacggtctgatgctatggttatcactgaacggtacaaaaaacaagtaccgcgtgaaaatatttccctactctgtacggctttactccagataacgtgaacaacctcggtattatctacaaactcccttggcactctttttattgctaatatgttctagaccaattggaatgtcacgcatccctacgggcctttggatcgagaagcttctatcctacttaaggacgcccgtgtaaggctccccgacgaggggatggagaacaaacgcgtgcagcttgttggcctactgctaaaggagaagtatgagaaggccgaggagatgagcagtactctgtgtgggaacgattgatttattgccaaagagtagtctgagaactaactttcttaagaaacctttctgatcatagttactacacaagaagtattacttaagaagtaaaaggctagtcactcctaggaagggtaataatctcaaataagaattatttgattcaagggggcagccagtgtaacacttgtctcactttatcacattaagctactagaccctccccgcctacgctgtctcatggggtcgagagggatgagaaaaagaagcgcttttatattgtcacctcctacgtgccttcccctacgaagtgactgttagggtacaataatctagatgttgtctacagtagagctctatagtgaacaaagccgtcaatacgcaacaattatattcatgaaaatgcaactaagtaacataaagggcgtctgcttgtggcctatgccccaggcaataggcagaacagggttcatcaatcaatccacacacttaaaaccaccatctaactatatttgcaagatctagtccgagcgggaacacctctcggagttcctatgactcccttttttatccaggccattgaccacggtatgcagtagcagccttgggatctccactgagtagataagcctatacacttatgatgtgaatcgaacccacggagggttgacttgggggttgaggcacccatgactccctcaactcgagggtacccacgaggtgctattgctaacatccgcatgtgggacattgtgctcgtcttggatgcatatcagacggcaaagacctgtaccagactagctgtctgttaagagcatgttttgggcttggggttttggactagatctagttccgccagatcttaatcgccttgtctttacctccactggcgatcttttgtccatcaggactccagtcgacagcaaacacctcatccttgtgtcctggaaggtccatcttgagcttgccggtgcgcaggtcccagatcttgagagtggtatccttagatgaggacactagcatacgcgaatctgccgagaaacagcactggtagactgcgcctacatggccgcggaaggtggtgatgaatctagggcgatgttagctataaatcattatactcaaaggactgaaacactcactttccatcacggccgttccacagcttgacgtggttgtcaaatccggctgaggcgatataagccatgtccggcgagaacgtgacatggtttacctccttttggtggcccagcatccgcgcgacaggcttgctcgaagtggacggctcccacagatacattgtgaaatcgtcactggccgataccaatcgctcgacaatagtgttgttcaccgtcgccgcctcctcgaacttcttgtgcgcagcagccaccttctcagcctcggtcacagggaccttgccagtgtggtcgtggtaggcggtgcgaagagcaaagtccgtcgatagcgcgaggtgattgacgcggtgggcatgcgccgccagagtctggagcagagtgccgtctttcgggttccagatcttaatggtcttgtcgtgggacgcagtgtagatcttgccagtaccaccccatcgcacacaagtaacagacgacttgtggccggtgagcacatgatcagttactctcgagacaacatcccacacgcgcaccgtcgagtccttggaggcggatgccaggcgcggccgccctgactcctgcacgtggtatggctcccaggccaaattcgtgatccactttgcgtggcccttgagccccgcacctagtgctgtcccctgctttgcatcccagaacctcacggtgttgtccatgctaccggtcgcgatcatggcaccgttcggcgagtatgcgactgccagcacccagctggtgtggcccttgagcgtatgtttcggagttccagtatcacagtcccaaacacgagcagttgagtctccactcccggagaccatggtggaggaagatactggggagaaggatgttgctagaattgcttcgccatggcctgcgatggaggccgcgcatcgtgaaacggctttcactcggaaaaccgcctgcggtgtgtagaagagcgataccgtatcttcggtggacttgatcccaggctggagtagcgagtggtaaacgtcgcggagaatgtcgatcgtttgttcctctttttcggaatggtaggcgaatcggtatggtactcgcccatcatcttcctggaaagaaatcgacgtcagtacaacatccaattgccaagaagtcacgagattcaaatcttacatttccttgtaatgtgttgaggagagtctccaggttcttcacattggcatcggcgactgggaccgagaccgcaggcccggtgggctggccggttgcttggtcgaagaattgaacgcgaacactacccagatcggatggaatactctcaatttcttgctgctcacgggccttatcagcctgaacgagcttttggcgcttgctgggaggaggatagagggttgacatggtgattgattttgaggtcgatgggggaagaagagaaatttcgacaagcaaaaatatcttgacgcttatcttatcggccctatcgatggatctactcgtacctggtacctacatacggaggacataagataactataactatatagttgactagttggttaactaagtagaggaaacaatcttaatcattataatcaaataaaacgacactggaaaccttcagatttatgtataggagggttactggtcacgaaagaagtgttggtaccctcggggccctggcttagtatcacatgagccctcaacccgtggactggaaccccggcctctaggcacaccctgccccatctatctacactctcttggccattagaattgagcttcacaatgtcggtttattcattaaattcatcaaattctctggattcctttcccccatcggcctctagatgtacaagtaaacgtccgaccacaagggccagcagtgttgcggcacaggagatcatctgcgccgtcagtgagtcgcggggcgtctcaaccaccgttggcctcgcatttatcaaccttgcgacagctgaatctgtgatctgtcagatatgtgacagccagacttacgtcaaaacaatcatcaagataggtgtttttgaacccaacgagatcctgttcatgaacaccgccaaagagtcgaagctccgttatatcatcgaagagaatctgccagatcccatcttaaccttcctggatcgcaggtggtggtctgaaaagacaggccacgagtatgtggaacggctggcttgtccacaggaagtcgggtcactcaagctgactctgggcgggaactatttcgcagcgtgttgttttgccgcagtatgaacactattcatgctgccgaaagaacgtacttacataaaaattaggtccttaagtatgttgaagtcgaactccagcaatcctttaccacgcattctcttcggatacgcttccagccgtccgaggggtccatgttaattgatttgtcgactattgtgtccctcgaactcatccaaaacctgcaaaaggcgaagtccaaggaaagtttgtttggactactgaacgagacattgacgcctatgggggccagactactccgagctagcatcttacagccttcgacagaacgagtcaagttgacagccagatacaatgccgtggaagatctggccactaaagaggatatgtttgtgtctgtgaggcaggcgctcaaaggctttatcgatgcagataaagtattgactgcggtagagtctctgaggctagctagtattgaagactcgtgctgacggattatcaagatcatcttggttcccatcaagcggacaatctaccatgtcgaacagtcagtcaacaatatcatcatgctcaagacttacgtatctgcgatcaaacacatcttccaggcgcttggagcagcagaaagcgatctactacttaccatacgcgaagtagactctacgttcgtttggtattttactcgaactaatgcattttagttgtgcgctcctgaggggcatcgttcaattgaggagctgattgacagaactctgaatgagcatgtagcctaccagtcaaagccacttgatctgagaaaccagcgcatttactgtgtcaaggtcagaactctacttctacattggatacagatcgctaacatgaattaggccggagttaacagtctccttgatgttgcgaggcaagcatataaagaagcgaatgcggacgccacagagatgattgagagattatcaggcatgtctggaattatggcatttcatggatcattctgacctatatcagagaattgggatatggtcttagatttgaagtatgacacagcccggcaatactacatctgtattcctgctacggaactaggtccgctgccggatgtttttatcaacgtgtaccgcaagcgaaaccgcattgaatgtcagacattggatttggtcaagctcaatcaaaagatcaccgattcccacaacgaggtgatcaatatgagcgaccagacgatccaggacctgatccgagatgtgtccgccgaagtatccgggctttttcgagtcagtgaagcaattgcaatactagacatgcttggagcattcgctcagctagcaacaaaatatgagtacatcagaccagagctaaccgatactctcgccatcaaggcggcacgtcatccgatccgagaacagattcatcgcagcaagttcgtgccgaacgacgcatatgcaacaccgcaaacaagattccagatcatcacaggttgcaacatgagcggcaagtcgacctacatccgctcactagccctggtcacagtcatggcgcagataggctgcttcgtcccagctcaatacgcctctttcccaatctttcaccagcttttcgcccgcgtctccacggtagatgatctaaccgccaacgtctccaccttcgcggcagagatgcgggagatggcattcatccttcgtaacattcagccacgcagtatggtcatcatcgacgagttaggccgcggcactagcacaatcgacggcctcgccatcgctatcgcgctagcagaagcactcatctgtagtaaggccatggtctggtttgtcacgcacttccaccacctgccacagattctcgcgaagcgcagcggtgtgatcaatctccacttggcagcagacatttctcccgatgaatccaagatgaccatgcattaccgcattgcagagggtcctgttccagaacgtcgatatgggcttgtgcttgccaagctcgccgacctcccacctgccgtcatggataaagcacactccgtgtcagaggcaatggaccacctggctaatcgtaggaacagcccggggcgtgctggtgctatttccctgaagcggaagttgcttttgtctctacgtgaacaattacttctcatccgtgccggtacaaaggacggtacaatggataacaatagtcttcgggatacattgattaaactccaggatgactttgcgatgcgcatgactgccatcaacagagaaatggagttatgccccgatgatgaaaccaagacagagcctcttagtgggactacttccaacttgtcagttcatgcacctgaaacccaagcgtcgggttcaagcaagagtgacaagggaatgcgggtgtcggagcccattgtcattgaatctgagtcggattctgggcctgaagataccacggacaatgatagtgtggtgttgattgaatgttgaagttaaggaggatggtaagtgaactgacctctttattatccccattcctgtagatcatatatgtatacttttatggtgacaatctgatgatttgacggggaattgaaaaccacattattccctaatatatgatatcagacacatgaagtgacaataacatggattacctctatacaatacattgtatctgcattcgctagtaggtacaacacagaagaacaagaaatctacccctacatggtatatattttaatggcgctccccgccatgcgatagccaacccaacttaggccaaatcaaggccaaatcaacataagaaacatgaatcaatctaaaagtgacagtgtatcaaccgaagtggaacagggtttgctttcccttgttcctctttccttttttgccattacttgagtcgtcattgctgggttcggccggagaggcggttccggaactcggggctgagccccatgcgttcggggcagggccgcggttatcattccaacggacggtgccgcgagtcttgccagccatgaggacattgggcttggctgctgcggggagagcagggaaggaatcagcgccgcgagaggcgggcgccgtgggcgtgcgactagaggatggtgcggcggatgagggccggctgaccgggctaggcatcgcaggacgagagaaggatggcggcggggcggctgctgcccaaggggtggcagcggaaggtttgccacggcgagaggaggggccagctgaggcagagaggggagggaaggggttggagggggcgtttgggagagcaccgctccttcctacggcggagcgggaggatttagcagttgatgacttcaagcgcaggacgcgcttgccgctagagttgacggcgcctgttgacatgccaggtaagagaccaccggctggaagggctggatagtcctcgttgatggcacgccagtcattccaggctcgcaggagatcggagcgcttagacgcgtcttcgtagatctcagcgagctccttgatgagcttgcccagctcggtgctagatgtatcgaataacgagaagaaggcatcgatgagctcggttgccgagatcgaagaagcgcggtagcttgatactctactacggaattcggcgagtttggtggcatcattgcgcaggaggttcgaagcacgttcaattacagcctcatggcgcattcggcgggtctggtcttgtgcggtagctggcgcggagtttgcagaaatattcaggccttcaaatgctgcagtaggaagaggctgagagcgcgacgtcgaggtagactgcactggggtggcagcggcggatcgctctggagcacgaacgggttggacgtcatctcgagtcagctggccgccaaagtttcgtgttgagacagactgcgaactctgtatagccatttgtcgctggtatgcaacttccgcacgagtcattggttgtgcactggagactggcagtggctcagcgttagggtcacggcctcgaccagcaccgcgccgctgacgttgctgttggtaaggagtgcgcatattatcgaattcggacaaatcaaccattctggcgtctcgccgaatgtccttagaaaggctatcgggatgtgcctcgatttggtgggccttcagatccatttgcgactcgaaaacgacaaactttttttccaagcattctttatccaggcaagcgaaatgatccttatggaagtgattttccaatgcgttgtagtcaatatagtattgttgttggcggtgggaggagcgtcggtcacagatgtggcaacgttcgtgtttatcgcggcagtgagtgtacagctcatcgtcaccatagaaccgttggcgacaaaacccgcactccggatgtcctctgaagccactctggtctatagctccaggctggtcgtcgccggacctttcgtgcttacgcaattccgccgtggtgaatagttcatgctcatgtgtaaagaccttcttgttacgagtacaaaggtcactattcggagtatacagtcagctattgattcaagaattgcgcgagcttgatatcgacataccacataactttgttgtgcttgctttttacatggcggtgcaaatctggccaccccaaacaggccacatcgcagtcttcgtccggacagttgtatcgcagcaacagcaccgtatctccgaatatctcgtcgctctcatattcgatgccaaggttgtcgtccgtccgagcaaagtccttcttgttgaaatcctcatatcgccgcactggatcatcagtgaagatcacgaagttcgattcagtctggtatacaagtcagcacatgaaatgtaactccaacgaagagcacctaagcttgttggaaaaaggttacaatatgatcataccctgcaatgagcacaagccctgttcttgtacagtgcacgcaaccgaagcgcacaaatatgacacgtcctatggttacaaggcgagaccgaggtatgttcgacggcagaagcgcaaataaagcagacttctccatcatctgcatcgtctgtagcctcttctaccggtttctttgctgctggcgtcgtggctttcgaaggctgagtatcttgattgttggttcgatcggtagtgcgagtttgtcggcctatatccccgccgctgccacgaccaccgccgcgggtgcgaggcttggggcgtttctctccatcgccggtattgtgttgcgaatctccacggccggagggagctgtccctccgcggccgcggcgacgcccaccgcgaccctggctggatgactctggtgttgaggcctggttgtcggtcattgcggaggaaggaatgtcacaatgcaagctacggcttggcgtcaatatcaggtgtgctggagctgcagaggcctggaaattgtggattgtggtgggggagaggttcggggaaaagtgagatgccgctgactgatcccgcatgccgcatttgataaggatgtgaggcctgcaaccgaccactctcttggtccttttgattacagaaaaagctcgaccgagcaattgagtgattcatggagcgttctattcaaggagtatggttttgtttccccattcccttatacaagcaccatgccagtgagtaaaagtactaggcagattcattggcttgttggcgccgacctgcttcatcaggtcaaaatatgatgagcagagagctaaataaatactgtttggtccatgtcaataggaagaccaccggctacatatgcaggccatggggttcaacaaagaaaatgagcatcagaagccacgcagagagcaaatatgatgtccaatgatataattgaccaggatcacgcatttcagtatctactgtctatatcggaaggatctccaattatgtatatcgtgtaggtagcagattccaggacctttgagactgtaaaatcactatggagggctacaccaactcccgctagagagcatgagcaaatcaaatccaaaagaaacaaaaatggcgagtgcaaattgctcggaattcacgccagcatccccatgcatcgcaaaaaataaaccaagaaagacaaaggagaatcgttaagaagcagggcttagtttggagcctgctcttccataaggatcaaagccaacctgtcactcccggactattcatcgggattgtacaaattctgattgagaattttagtcatagtgaacatgtggactcgatcttgcttgaagacagcacgcatagcattgtcgcataggatttgtcggcgatcactgggatcctgaagctcgttctcacgaatgtattgccaaacctttttgacggtttggggtcgcgaaagctgtatgatgtttagcaagcaaatcctagagagaaataatcggaagaggtgctcactgtgggctctcctagaagcgcggataggggttcggaaaggttcataggtttctgtggttgtgttagaaatggtgggaggcttgggatgatatagaaaagcatacgtggaacccagtatttcggttgacctccctctttggctcttcgccggagccaatatctgaatcgtcttctgccttgaccctcttcgaagttttggctttgctcttcttcttcacaggagctgcacgccgagtgttgcccccacgagtgggtcgcgcgcgtgaattctcttcagcttgcagcttggctgcgaatgccgcatccgcatcggtatcagtatccggcttgtgtttcttagcaggaggcgatgcgcttgcaggctcggaagtggcatcgctggaggcctggcgctttataggagatgaggagggaggcggggagggcaccgcagctgaagctgaatcaccatcgcgctgatcattgcttggggtaatttcatcaggcgacccgcccaccccgttttgttcggcgtaacgatcgaatcgttccatgatcagctgcttgagcgtagcctttgtgaatgtcagtcacagttcttcgccagtcatcctgaatatctttggggtaataatgcgccatagatcgtcgtaacttaactgaccttcatcggggtgagatcatagccgacggcatcctgaagacctttgcggattcgcttctcagagatggtagtgaggtcgcttttggccaaaataccatcaattatgtcgatatatttgtcgcgcaagtcagaggtcactattgcgcaagatcaccggtcagttaggaggctttctagagcaccggcaaattagcaccggggcaacaccgaggtagcttacacgacatattgttgctagtagatcacgtagcttggccagttatgttcagacgtatgagctggtttgggatttgcagttcgcaattgaggatatcgtggggtttgtagaggagtatggtggtcgatggagagcttggagttgtcaggtgggctatactcaagtcgcactggcgcttaagaccggcggggcattggaggcagagaaaggccaggcgaaaaaaattgcagagacaaaaggattatagataagatgctagacaaagaccaggtcaggcaaagagctccgtgcaagatatgcagtctaaaagaaatgtctatccattgatagcctctagaaacgtccataatgattgacgggcccgacctcaagctggggaaattatgactaagctgatgcagctccgtcacgtggtatcttgtgcctgaggcctaaagttaacaagtgctgactcagtgctgagtcagtccacacaaagaacccgcttggccgccgcgatttgtttctgcccgaaaatccatcagcggattgcaccgatctatctttgctccgaagcctctagacgccttcggtatacccatcatggcgcccagtttcgataccctgtccgagcaggatctccacgaggaagaggaggaggagattgatttctccggtgagtgcaagatttgtcgtggtctgtgtgcccctctctaacacattagtccacagatctcaaggagcaatatgaagtgaaagtcgaggagggactggacacatttatcgtcatcgatggcctccccgttgtacccgaagatagccgacaaaaactcgtcaagttcttattgagaaaactcaactccgttggcagcacctccgaagatgcggttttcatgcccgttaacgacaagaagatgactgaagggtgcgtattggatatctaatgagatgtggaggaatcatggacgatctctaaccttcgttcgcgcgatatagattcgcctttgtggaatatgaaaccccggaaatggcagtcgccgccgtcaagcagttgcacggcgtccctctcgataagaagcacattatggctgtcaacaagttgatggatatcgagcgttatggtcgtgaaggtcgtattgatgaagaatacaagccgcctgtcccggaaccgttcaaggagaaggagcacctgcgctcgtggatgggagatgccagcgcccgggatcaattcgccctttaccgtaacgacaaggttggcgtgttctggaacaacaagacgaacccaccggagaatgtcgtggaccgcgctcactggacacaacttttcgttcaatggtcccccaagggtacattcctcgcctccgttcacccccagggtgtccaactctggggcggcgagtccttctctaagcaaaagcagttcccccaccccttcgtgcagttgatcgagttctccccgctcgagggctacttgacaacgtggtcagcacggcccatccaggtcgaggaaggccaacccatattgacctacgaggaggacggcaagaacatcattatctgggatatcgagactggcaagcctctccgttcgtttgtgtcgcacgatttggctgcccctgcggatattgagggtagcgatgttgcgcctaagaaaaaggtgcagtggcctgccttcaagtggtcctcggacgagaagtacgttgctcgcatgctccaaggccaatctctctctatctacgaacttcccaacatgaaccttcttggtcgcacttccgtgaagattgagggtgctatggacttcgagtggtcccctgccaccgtcgcccgcgagggtatcaagcagtacgagcaattgctctgcttctggactcctgaaattggcagcaaccccgcccgtgtcggtatgatgagcgttccctccaaggaggttgtccgaacccgtaacctgttcaacgtttccgatgtcaagctgcactggcaatcacagggtgcctacgtctgcgtcaaggtcgaccgtcactctaagtctaagaagtctatggctactaacttggagatcttccgcgttcgcgagaagggtgtgcccgtcgaggttgttgacagtctcaaggataccgtgattaactttgcctgggagcccaatggatcccgattcgtcgttatcgccaacggtgaggcaccaactggtgccgccgtcctccctaagacttccgtttcattcttcgcgcctgagaagaagggctacactgccggtaacttcaagctggtgcgcaccattgagaagaagaccagcaacggcatctactggtcgcccaagggccgattcgttattgtcgccaccgttcactcccagaccagctttgacatggacttctgggatctcgacttcgagggcgagaagatcgaggctgagaaggatctcgcagccaacctccaactgatgaagactgtagagcactacggtgtcaccgatgttgactgggactccactggtcgttacgttgttagcagcgccagtgtgtggactcactcggtaagattttacctcgttctatttttgattgtgttacataatattgaccccattatagatggagaacggctggaacatgcacaccttctccggtactaccctctccgagaaccccaccgaaaagttcaagcagttcctttggcgcccacgccctgccactcttctaagcaaggaggagcagaagcaagtgcgcaagaatctccgcgagtactcaaaggagttcgacgaagaagacaagtacgctgtcgacatcgccaacaccgccgttgtcgagacccgcaagcgtgtactcagcgagtgggtcgcctggctccgtcgggagaaggagctcctggcggaagagaaggaggccttcaacctccccgaggacgcagattcacccacagccgccagcgacgcgcgcccggttgtcgaagatcagggcgactccgtggtcgaggagattgtggaggagattatcgaggagaccgaggaggtcattggctgatgaatctgtctgttctattttcgcaaataatgtgtttccttttgttcctcttttccccctatttctttgctggcgtttcgcgcttgtgcctgaacccagccttctgtccccttgtgtttcttttaggttccctgggcaagcccagtgaggatcgggacattacaaaaatcaatagatcgagcggtgcgcctcccgaccaaatgtgcaatgtggataagcatgagagatggctacgaaaccagttcctagcgaagttcaaccttgtacttcttattttaaattatttaaagtaaaccatctcaagagtaaagttctcaagtataaagcccccttcccacgcccaccgctcccaatgttaccagcatcatgcccaatgtcgagtccagcgcgaacctcatagcacctcccgtaggctgactctgacttccgatggtagtggatgtcgcagcattcggcgacggctcagtgatagacgtggaagaggactcagaagttgtggacgaagaagacttggttgaagacgaggactctggcaagacgttctttttgaagtaggaatcatgcaagcccacaacatttccaggaggtgtatattcgcaaaccacataccagccttgagcccgcggttcgcctcgcgcgaccttcagcccttccaagccatctcctccagcttcatccacactgaaacgaggcgtcatcaccaccccttcgaacaaatcctcttcgaagacatcatcttgcacttcgacatcgacatctcttttcgcattgtcattcttcgtatacccacagttgacagcggcacacccaacctgcgtagttgacttccagaccaactgagtgaaatgccccgtcgcctcagtgaagcctgtcggcttgtcgaagttatacaattcgccttcatcaccccaggcaatgacagcagcagagacattctggtatccgtatgcgaggttctcgccgtagctgctttcctgcgaaggtaatactattagcgctattatctggtagtatggggggaattgatacataccgaatgtttccagatacaggctgaggcccactccttcgagtaatcggccaaagtgtcgttccatttcagtggtttggcatcgtgattggcgcggtaatcgttcgtgactttcagcatatcgcccttgaactcgtccagggaggtgtaggatggtgacacgggggctgtttgtgttggcgctggcacttttaccgtcgtccagacggttactacgtcggcgtttgcattgagtatttgcacggtgaggagtgtaagaatggccaaccatcgtgtagttctggtgtgagtgtttcgatccattttgaagaattcgagttattgtgagcaggtggctattgcatgatctagctctttttttttttcttatggtcttcagatcaatagatagcaccagggtccgaatccaattcaggcggcggtcctaagccgtgacgatatccccttattggaaggtggtgatgcaataatcgtgtattgtctattgtcttaggcaaccataggtatttattgtgcgtgcctgttctgttctcatagaagctccttcagataatattcttcatagagcttgagaaacgaacgtactcaacacctggagggtgaagaagattgctgggaagactgggaagaaatagagccattttgaaattctattaatgttttagactgcaaccgggcaaggcgaaagttggatcccttcttctcatctccgtttcagccgctgtggtgatgttccagcagccgccggtgttgacgtcagactcttagggctacggggttgcatcgtatcgaacgtatttgatctttgatagttgatatttcatatttcgtattgattctttgatgtctggtttatctctatttctctgtgcagctagactgtctggtttcgtctggtttcgctttgtttcgtctcgctgaaactgagaattggtgacattattatagaacttctctacttctatgtatcaaatcccgcaaatatgtaccatatccttgtacatgaatcgctctttatatactcatagcagtcgactttccctaggagaacattccgtactgacatgcatgtccgcattgtagggccctatacgccactcgctatgcaattctcgggggtatcggtatctatttacatcaaattgcaaccaaatccatacatagctcgttccacgtcccgcttgacgaggtaccagtcagcccgccgctcagcaaattcatatacctcctccacacgccaaattccatggaaccgatccgcatccgcgatgacagtcgccagttccttggcatggccaggatcgatcaagtaaatctgcacgagctcacggaatgccgtgaaatagagaagtagctcattgtttcgcaaggtttgaatatacttgaagtagtggttcatgtcgctaggaagtcaagtcagcttgctgttttgcatggctgaagatcgagatacatacctgatcaacttgagtgatccctccacactgatgcgctgtcgcttgaggtgtttacatagagcggtaaataagcggagcccaacttcttgattaaacacatctagggtgctcttgtccgtgctcccgactagcatctgcgtgtgcgatgaaaccacgtcgacgacagcgacagcgacttcgctgacgcctacatccatagtctgtcggtggggatctggggaaactccgggattgaaatcggtggctggctgtcgggttgccaaaatgtagtccacctcttccatgagaacgtcgattcccttattcaggccagctgcgacacgttcatcgagcatctgttcgaactttttcttttctttattggcagggtccacgaaatcgttcctatcagtcaatctcatgccgatcaactcctgctcgtagaatacatccatcatttgcaggatcaaatcgccgacgttgaccagttctaggaaagtgaccaggggctcgaccccagattggtcacgctccccttgttcgcgaggtcggtagttggatagatgactgacagccttatcgaatccaacgataacgtgctgatatcccaatatacgtagcaatgttacaaaaattgcctcgcattgttgctttgctgcaagaccaaattcgccgccaagtcgcacaaattgagcggctctctccaagctagacttggcggaatgaactagatcaagtgcaatttcgatgctaaacagtgagcggataccctccatctttatcttcatgatggccgcttttgctgccagctctgtagttggagcttcgtcgacggccactggggcaggcgacgatattgtcgagaatcgattggtatttttagatggttgcaacgggtttggactgcttgtttccgtgtctggtttggattcttcggttgatttggcactagagaaacccggcaggatgtttaccggcatcatgatcactttcttgaaagaagtaaggaagtctcgtttgtcggcttggcgattgacatttgacatcaaaaaagactctgttgaggccgcttgttcggagagatgccggtcccactcactcactgtaaattcacaggccttcttgaaaaaatcaagctcttctgccaaatacagatcgaggtgtggctcgtagaccttgatcacgacattatcaagatactcatcgaatttagcatcggaccctcgtatgggaagcagagcctccgagaggttcatgcattggacaaaggtcgtcgagattgcagtgagatacgacttgatgctgacgccatgcagctcatcaaatattgccgcgaggaaaggagacaacacatcttcgccaactttcgtcataaaggttgatgtgacatccaaggccgggggaaagacgcggttcattatggatatttcgtcgttgaatgcgacactgagacgtgtgaaaaaagcctgcgtctgctccatcttaagctggccggtcgacccgtcaatgcaggaagcgacgcttcctaggtcagacttccgagtcatcaggtgattgtgatggataaagaggtccacggcagcttgcccaccgttgagtgtccatagaatgtgtgcgtatttccgcatggccccatcaatgtcgtcggtttcatacccctgacggaactccttcagcgccgcagtctcaaacatcgagactgtacgctctaaacggtcgacccgctcgtcccatccttgtgtcatgtcagatttggagaacattagcaactgtgccagtatctgcgcttgagcctggggatctttatatttcgtgaaaaccaaattttcagatgatggttcagatcgcgcgatgtcctcatagaacggtgccagtgcagcatgtatcttgccgtattcctgacgcgcctcaccccggattgaccttacctgtttcaacacggtcagggcgggttcatccatgagatcctggaatacagtgggctgtgatgccgtattgactaattcaatcttatcgaatccatcggatagtgctttcaggtcactagaagggtcatcagtggccgcaggaaccggtccaaccagctcagcctcctcttgctgctcgacgacctccatgttggcgactgtcccaaacaccacttcggcatgctttctagcatctgcttcgtcccagcatccgattcgtttcaacttgtgtacccatcgagtgtcatcatacgccatctcgtgtataagcttgcaggaccgtgctgctcggatcaaatcaacagggccggcatggtcgagaatagaggatacgatctctatttttccttctgtcagcaagtgtttctttcgcctccgtatgtcttcatctcacgtacctgccggaagagcagctctggagatgtcttccattgatgccatgcgcagcgaggccagcacatctctgcgcgcctgagctgcggccgtgggccctttctttgcacctggcatattgtgttcctggactctgcatcggaagagaaggcactcgtggggatctcagaatttgaggcagcctcagactcgctccaagctgtcccgcggggttgtggggaatggttcggtctcgatatcgagcagacacggcgtcttcggggtatatttgatgtcgagttctcaagcagacatcttcacatctaaccacttatttctcaactacaaatcaggaaccacattccaatgctgcacgatcacgcacagacagggtccaacgccgccgcctcctcgggctggcaaaatgtacaccgctctctcatagagtcagctgtacggagtggacgatcgggctttctttaattggaaggaaataagacagttgaaggatatttggtttttgatgctgtagaaagctcaattgtggctgttgtgtagctatgaggaaagtgaattaagaaaattgaaagatttttaaagcaacttggtggctaaatatatacatcgggagaaggattgagatttaacatagaataatactttctgattctagttttttttgaaccattgagagccagaaaagccatttaaatcaatgatgttctccctaatatgatataagctgcaatacaagctgatatagccaaacatagctatagtaagacttacctatggagctatgtatggaggtacaggatagaacccgagatacccggtctttgaagaagatattgaatgttggggaaatatggattagtgtaacatatagatacatatgtaaatagtaagtagcaacctgatttaaaagtcttctagctatgttccaacagagcactggtgttccggtgatgcgtgtttttctcggtgaatcccgggatacgcacaaccggagaaaaaaagacgacgacacagaacaaaaagaagaacaagaagctatagaaaggatagattgggtctattctaaacaattagtagactttatatagatcaagtccattataggtcagcagaattgcgatgttccgagtgtcggttttctagcgtggccgggagccaatcagagcaagggggtaatcatcaattgtcaagtttcttcgacttcaacctcaacctccagcatctctcttctgtaccatcccccctcctctccccacccacccctctctcgctttggcgttacagcacctattcccaatcaaattcaattgcttgggttaaacatcgtcatgctgggacgttcgattctgcgcgcgtccaaccgggccttcgcccgccagtccctcgggaagtccacggtacgccctcaccccattgaccttcacggaaaaggacaattgatctcttaaaccggcattggattatccaaggactccgttgctaatatccaacagcgtgcctcttccaccgccgccggcgccgaggccgccagctcccccttctacctcacactcactgctgcgcttgcaactgccgccgccgccggttccaccgcatggtactaccacctctatggccaggaggccttcgccatgacacctgctgaggaggggtgagtgaaaatgcccaggaggatcgccgacctcatggctcattgtgcgatccatgctgagaacaatggtggaagctaacgggtgactttatctagactccacgctactaagtacccttgggtgcacgagcggttcaacaaaactttcgatcacgccgcgtgagtgctctctccttaaagccacattcgtgctctcgccagcatacattgtactgaccccgtccaagtctccgccgtggtttccaggtttaccgtgaggtttgcgcttcctgccactccctcagccgtgtcccctggcgttcaatggtcggaaccatgcacaccgtcgatgagatgaaggccttcgccgaggagcacgagtacgacaccgagcccaacaacgagggtaacatcgagaagcgccccggaaagctttccgattacattcccgctccctaccccaacgaggaggccgctcgtgccgccaacggcggtgctcttcctcccgatctcagcttgatcaccaagggccgtcacggtggttgcaactacgtcttcaacctgctcactggctaccccgacgagcctcccgctggtgctaccgtcgctgagggcatgaacttcaacccttacttccccggtaccggtacgtaacgacaagcccataccattttttttttttcctttttagtgtttctaactcggcgataggtattgctatgggccgtgtcctgtttgacggtgttgtcgagtacgaggacggtacccccgccaccacctcccagatggccaaggatgtcgtcgagttcctgaactggtctgccgagcccgagatggacgaacgcaagaagatgggtgtcaagtccgttgtcctcctgaccggtctgttcgccatctccgtctgggtcaagcgctacaagtgggcccctctcaagacccgaaagatcgtgtacagccccccgatcggcccccgccgttaaatgttgcagcaaggccttttttgagtgggaaaatgtgagaggctgaaggggccggtacgacttggggaacccataccacatccccggttttgatacaggtgcttcaaagaagcctctctgtttcatcattttctatgtgtctatctattggtcgctgtgtctgtgttttgttagaacgctccccgaacacctgtatctgtatcctagatatattctttttttcatttcctttcgaaaactgtgtgcttcgaggagtcatctgaatttaatttcctttgtgattatgacagatgaaatcgttacatataaccatgtaagtctagagttgctgtttcataggaatatgaaatggtatgttctgcgacgtggtaataagacgagtgtacagatcgttttctaattgttgtatgtatatgcaagaatatatatggctataaagctcatcagaaaaggcccagaagcaacttcaggccgaggtatcatctagagtccgctcgccatccccaaagacaggagcgaagaaacgatcatagctattccacacacctgaaaacgtgatattagccacagccaccagccatggcggaatacgaccatcaggacctgcacatattctggataaaaccaaagtcacaatcaacaaaggcgcccacatggccaggaagatcaccttcccgatcttttggcgcacggttgtaatacgataagtcttgatctgcgcaagatatttttgatatgaaacaggaagatcatgttccgcagcgccagtcttgatcaacccaaggtaacgggcagagggctgagcgtagtcagaatccggccggaaatgcaagcagaccgtataccaccacgatagctttgggctgggcagcaccgtcgtatcgcctttccgggattgcgattcaaggcgcgcattctccgcagctggtgagagtagggtgcgtgccttgaaagctggtgtggtggggtagtctgggaccgggtcggatgagttgtagggttgagggaaggcatggcagttgatgacacagtcgcggtatccacgaccaccgccctctgtggcgatgatcttcgcgtagtcggccaatgtaacttcgtagacgactccgactagaggtttgtgccattgacgcttgtcgcaacccgagactgcctccacctgctgtgtccgacccatgagcgctgccttctctgacagatactcgctatccgcacctgtttcgtgatcttggagttcgacctcgtcatctgccaaaggagaaatttccctgtaatttgtgcctgcgaaacacggctctgcatacgggattcctggaagatcgaaggtgagacggagttcgggaacgagcacacagatctgcgagagtggtttgatgccgcgcacttcacgaaaagtcttggaagctaggtttgacccgtacgcgagatagagaaccgtctcatccctggcagcggattcagatacaccaatcccgtgttcctgttgtatggatatcttctcgggaagagtcgcatcttgttcaagggaagtggcgacgcttgaggctcgacggcgttgaacattcgttctggaaatagggtcggtctcgagcttggcattcgtaggcttagaatagtcggcgaggagaaggcctcgaagccggtctagcggttgggtcgcatcgaacaggcatcgagaagctggcatctcttcgccgtcttgtgccgcttgttgtgccatcgtgtagacctataacgcaatattgggcgtatgaacatgagatctggcagcagggttaacctgcattgcttataaagcctgtcagccgcatgaattgatgcattgtcagcaaaccagatcgaatggtggcgattattaatcgtggatgggtcacggatcgcggagtttccacgggccgatcggatgaggattgaagatgcattgattccgagtggattctgaaggttagggatggtacttgagcagttgagtaggatcaggtctgaggagaatgggagagaatattatggggaagctgcttttgatagttagatgactgtgatctcaaagacgtgacaagcacgcaacttgagatataaatagaacacttggcttccccagaatctagatttatcaatctcggcatttttagatattcagtgaaagtagaacacaataatatatagaacacagctatgaatatacttccccacataattgtaagagaattaatagatattaatgaaatgagacctggctgttgattatcggatctatattcctttcatgtatatcatagtaggacaattggagtgatgttgtacaacatatagatgaggtatcatgtgatcaatatgctggaactgggcttagttcagcaccctcaccagctgcgcagctctggagaacacgctttcttttacataccatcctcatgttctgattccaaatgtatgacgatagcgaccatgaagccagttcagggctcatctgaaccaatcaatccagacaccgggagtaaggcgactgccaaagaccgagcgaccccgggatacctcaaaggctcaggtcgtcaaaagcaaaaagcccctccatcccagtcttcggagtcgaagattgtgcgactgaagctcacaaaaccaaggccacccaaacccaaaccccaagaagtggactgggatgaagatctgcgtcctacacccaatgagatagctgagaataaagggacccatggagggacctccgttgcctatacagacccgaagcgaccgaagacagttggcagaaacacaggaagcaagcgagcaatggaatcaaagccacaaacgacctcggccaaacgcaggaaatcgaacaggaagagcactactaccaaggagggcagcaatggagggccacaattgccattgataacacttactgcaagcgccttgcctcctgcagcccctctaggtaataacgggctttctgatatgggccccttggacgggcaaagcaaagattacgccacgaagctagatggccatgtgcccgaagctttgaaccaaccttcgctaccgacagatggccacaacaagcatggaaataacagcgagcgaggtgtgatcgtcgggataagaagctgcacatcggtgacaactgagtcatcctcggatttcgaagaccatggcaaagggccatcccgtacttcaaaagtcagcatcctggagcatcgggcacagtccaatagacaaacagataaaggcaaatctgtctatgtgatgcccgaggtatcctcaagttccgacatcgacctcaaaggaccgtctcgcatcactccttcaaaggtcaccatcctggagtcaagggcacttccaaaggaacgaagcagccaggccaagacggttcatgacaagagtcatcccaaaaatgatggtagagcacagagtgttggcaacaagctgatgcttgcgctccacggagcagagccttctcattacgagccagtcaatgaccgaaatgcacctctcatcatttcctccgattcagtgcaaccccaggaatctcctagaaagcagcagtctgaccaaatgccgatcgaaacagtgtcggaatcctcagatattcgaagagtactggacaaagcaattcctgttgaaatacccccgaaccaaaccgagcctgagactgtcaatccagcattgattaccaaaacacttccgcctaaggaagagaagatagaacagctggatgacgcaagcttctggaagctcctgggcgatgacagaatgtccactccagcgagttcttcagaatttgaagccggcagaggcttgatgggaaacagcccttcaatccttgattaccacatggaaatggaacatatccccggatttgcaaccctgcagcccatgagatccgcaccgaccaccccttcacacgccactaacatttacgaaagccaggcagacagttcggggatatcagaggtaggaaaactcaatgatctcatagcagggattgagggacgcgagggtagccataccccggagtctcaaaagccacttctcaccaatgaatccctaatggaaccgaattatgcatctccccatcccccaaaatcagtcctgaggaccagcattgtcgacggtaacggtagtcctcgactcatgcctcagtcagccaagagcatggtttcgcctcagtttgatttggacggcgaaaggggccacgaagagacaatcagtgtcactgacactagtccaagtcaatacgatcgaagctcatgcagtatctctactgagagtaaatatgaagggctcatgtggaccaagtttcagagagacatattcctggaatatgggatccaaacggaaaaactggcgaaatctcatccatggccaccgcctaaaaagcatcgcccgtcgttctcccaggaggatactgctgatggggcccactccgagaaagcatcgacgactggaccaagttcttcccagagaacgatcgacgagagagcattaggcagcgctccaaagaatcacgagtatcttgaccaatcgtcccgaacagatatatcagggtcaacacagtcagctgataaatcgaatcaatcctctgcaaggggtgatcatgatgatatggaatggatatcaactttgcaagtggcgcagaaagacgcgcaccacctgcttcaacaaaccaatttggttagtcgatactgtttatgtgagtgggaccgtgctaactggcgtttagaatttgtccactcagctggcggcagaaaaggccactatcagtcgagtcctggagatctaccgagagggatgtagtcggatccttgacgacctgttccaggcgcaagaagcacgaatgcagctataccgacagcagatgcaatatgttaaggaacagcatgcagatatatgtcaagacctggttcgtggactgcaggagctcgaccgtcgggtgcaacaagggccaatctgaagactgaagacacggggcttaggaaatcacctacatgtattatttcggaggatgacacaaggatgagcagtattgcatgcaagtggcctgattcttataccgaaatatcaatatgatatgttttagtccacattttcccacatttctttttataaatgggatcgccgtgattggaactccagcgccggcccaagttcaccgaggatcacgtggaacttcttatactctgagcttttgactcattcgcgagcggctccaaggtttctctctatttttatattttggtattcttctgttcactgcaattacttccgtttccctcaattgcccttgaaaaactgccctcttcacctcccctctgcctccgatgtcggtgagtcaagcccctcattgatttttaattttacacctctgacgtcgccaattccacagttcttcattgataaccctaatgtgggcaaccacagtcatttggaagactctcgcagtaagtccgacagtttcattttacgcgtaattggtctctaacaagctctagttctcggctacaaccctctcaccccacccaatctccttcagcatgagatcgcattgaccgagaagtcacgacagaccgtactcgagggacgaaatgaagccgtcgagattgtccatggcacagataccaagctccagcgtctgatggtggtcatcggaccatgctccatccacgacccggaaatggccctggaatactgcgatcgcctaatgaagatgaaggagaagtacgccgatgagctgctgatcgtgatgcgctcgtacctcgagaagccccgcacaaccgtcggttggaaaggcctgatcaacgacccggatatcgacaacagtttcaagatcaacaagggtctccgcgtatcgcgccagttgttcgtcgacctgaccaacaagggcatgcccatcgccagcgagatgctcgacacaatctccccccagttcttggccgattgtctgtcggtcggtgccgtcggtgcgcgcaccaccgagtctcaggtccaccgcgagctgtcctccggtctgtccttccccgtcggattcaagaacggtaccgacggctcgctcgatgtcgcagttgatgccattggctccgttaagcacccccaccacttcctgtccgtcacaaagcccggtgttgtcgctatcgtgggaaccgtcggtaaccccgattgcttcgttatccttcgcggaggcaagaagggcaccaactacgatgctgccagcatcgcggatgccaaggctaagcttattgccaagggcatgcgtcctcgtcttatgattgactgcagccacggtaactccgagaagaaccacaagaaccaacccaaggtcgctgctgtggttgctgagcagcttgctgccggtgaggatgctattatgggtgttatgattgagagtaacatcaacgagggtgagtttttcgaacgtttttactatctgtcgaaagctgtttatactgacctgcgctaggcaaccagaaggtctccgcggagggcaaggccggtctcaaatacggtgtcagtatcacagatgcctgcatcaactgggaggacaccgagtcagtactggcgactttggctcaaggtgttcgcgctcgtcgggaaaaatcggaaacgaaataagctgtgttaagatattcaggttcatttacgacggggcatttcttaagcgtgtcacagtggataaaaagttcaatgattttacttctttcgggtttgaagctcaacacgttccaccctagggcaattttgctacgactttcttttttttagcagtagcgaagatcccacttagggcagcggcatttatagtggagataccgggccgatcggtctacggctacctcgaagccgacttggtatgccgccaagatattaagacccgtttaaatgctattgacttccgggacatctgaaggaattgtcaacggaaatggagaaacaccaaggcaagtacagaaaaggtttttagaagaacacactcgccgattggcggcgcagaaaggcgcctgcggaaggggtcgaggaagagcagttcggtagataggatcgtgtttagtgcaataggctaaaagcctaggtgtgcgttctcatcattgtatgcattaaatccgaaagtaaccctggcccctatgcccctgcgtagacttggcctaaattgcttgtaccttggctggaagttctttttttaagttggtcatattcactatggagacattgagacatttcaaaaatctgctattcatacaatgagtctacacattggccccgttcgattgggcagtaatcctcaaatgtcgaggcatacttgtggggagctcatcgaccccaacgaacggccaagggagccggtagacgacgttgtctaccaggatcacacccctcaacatgaaaccatgtgtgcagtcagaataccgagaaaatagattgtaccttttcctgcggcagaatagatgcattgcttcctgcttaaccaagtagatgtagttgctccgggaaaggaagcccacagcattgagttcatcgtcaaactgaagcattccctggtaggagaaggtgttcaggtaaggatgagaaccatcctgtttgtgtctcattagtaactcaaatgccttgagtgtttgcattccgaattccgtcaggcctaaggctggccagagatcatggcttatatgaatggcttcgagagttgatggcagtacatcgcgaagttcccaggaaggggtaccacagccaatgagaaatttgagcggtagagatgccgtttttaatttgggaaacttcatcaacatgccacaaaaagccttaccagcttgattcctcacacgcagagtgaaggcttgtagacaacatgggagaagctctaagctgatagagagatgttcgatcgtttgacttgaagtttccaaggaacgaaggaggcattcgggtgctttgagaaattcggctgttgcgcggcatttgtagaccatacccacatgtaaggactccagatatggcacttgagacagcagcgaagcgatttcctcaggcaaaagagatgttttggaaataacaagactgcgcaattttgacaaattcaagggtattttcggtgtcttctcagggaggacagaaataccctccacactaaggagccatatctcgagaaccttcaaggaaggaaggtagaaccaagggatgaactgacagcttcttggcagtttgatattgtcgcgtaattcagtgggaggaaagttgcttccatagtcgaccatttccaattttgagaattgacttaacatgccaaggggtgcgtcgccgaagagagagtgatgcaacatttccccgggaaagccctcttcaagcacgaatgaaaagtctagtcgaaggctgcgaaggttgtgaagttgcaagatcagcactgtggcgtacgcgtaggcgtctccatcaaaaagccgtccgagccatctgatatcgcgatttgccgggaagttcgcgtctcgaacaagcttccgggcccaaatcaaagtgtgcctatattctagcatcatcttgttccattcggcccttccttcggggacagtgacctctgttctccgggactccacgtcccaccataccagactgacatgccagatgtaggaagccagctctggccgctcggagatagtccggaggaggagcaggattttatcaatggggggatgctgccagtcccagtgaattgaccgatacaggaaaggctcagtggaggcacgagtgtcgtgtgaaacctttgacaagttgttcgaatcttggtttggcagatactctagtatcttcagccagcagtctcgagggagactggcgaggggagttgtgcccatagttcaatagatgtcaacttactatgctcccaagatggacgctgaaaggtgagatgagagtgagtgtaagaatataagaattcctaaagcaggggaaatgagagatgaaagaagaggaagaggggagggggagggaggaaagggaagaaacgagaaagagacaaaacagacaaaataggaaaacagaggaagaccaaggcgactacaaacacgaccttcagtacctggacatccgagagtagtatattcacaaatcatattaatacaagggaatcttaaaatctataatgcaagctgcaaaagatgagcgtcgaacagatggatcctgatgtataccgtgaacgccagcagcacatggcttgacattgactccatcagccgaatagcgaccagcaccatgacgacccgcaaaccctgtcttcacctcctcaaacttgcgttttctcgaacgtatcccagttgagctagcccgctgaacgataccaaggtcctccaattccccatcagaaccaacaccaagagaccgggtgggagcatcgccagtatcaacatccaaaaccgtagctttgccatcctccccaaaagcccaaaccctgacaccaccctcagaagactgcaaagcaagctccacagtccccttaacagacccaatctccttgccatagatcttgaacggccacatcatagcggtaggccgatatgggacagacaacaggaaatcccaatccccattctggttttgcaccagactctcgcgccgcttgcgggatcgctccgagtcaatgtaccagtcgagtgcgagatcgctggaacccatcaccccgtcgccctgacgttcacgctctttgcggatgacgttgaatacgtccaggggaatcgagtacagcacgaggcggtcgccatagactgcgacaatacggagaccccagcggaggtcggagccagcggtgaaggttgatgggactgggaggtctgttggaggcggatttgtatttgagggggatggggatgggggtggtgtcttgatttgtcggttttgagtgtttgagaaaggtggcgggacgcagacgaatgcgcgggttaggcttgttggcccgcctattggagcgtcggtgccgatacatagcaggcttgtgcgtggctcgatgaacatgatatgcaaaccgtcgttaatggggacggcacgatagtggtgacagtgtgttgcccggacgaagctgcgggatggggtgtggggaatgatgcggcggttgaaggactgaatatctgcgaggaaatggaattggttgctttttgggtcgagttttggtgatgccaaggcagatgaaggggaaggtgaaggtgaagggggacatttgcattcgtgcaagcctggtccggatagtgaagaaatgagacgtagctcgttgggtgtttccggactacttgggaggaaatgaaggatttcggagggttgggggagggtgaagtgtctgcgttgctcctggtgctttgtttcgttcaggctatgaatctcgatgccagcggcgcagccgaaagcgacgatcggccgccctggacagagagcaactgtccggggtgggttgtcgactgtgcagatgttgtagaagaagtggcgggatgaggtggccattttgctgttgaaatgagatcctttggtagtcgagtctttggcccaagccatatccaagttgcagatcatgccaacacgactgcagagcaatgcagcgatggtgaattgtggcttactggtgtcgatgacggccgacagaatctcgaacggacacgagatgcgtgagactagcgctatgccatggctgaagggtgcagatgctggcctagaccgttgacccgaaagataataaatatagatcgtgtagcctgtcgttacaagcaggtagttgctgcaactgctaatgctgaaagttgacccggatcgtttgccttcggtctgcaaaaccggctgaagtcgagtgcgggatgttcttcttgcagaatccgacagattcgaaaagtctaccacagcggtagtcaaaaaccccggcttctcggcattcaattttcgccccgaaaggagacattctgtcgcaaagcggcggctcattctccagacctcgctttcatctaaccgagagacgcgtggcgtttgacagtcttgcagccatgcatcccaccaccctgctcttttcaacatgttctcaagtagcttgtggtttaggctaattcgcatccactgtgagcatgtccgccgggcgttgtcgaagtcccgcggtgtcagcatggagaaaatctccagtaggatctctgccggtgcaatatttgcagcgggacgagatgagctgctcgttgaattgcgttttgagagatattgaccctgtgccatgtattttgtcacagacttattcaaaattgggggtattggcctcgttgagtttcgttttgtgtgcgtggtagaggcattcttggacatcagacgggtatagtcttgaccggaagaccgcagcgcaggcatgttgatataaccttccagcaaaggaagtgatccactattcattggatctcaatccctttgttcgatccagaacatttcttgcaaatcagatgttgggattggatgtgaagtgaatttgacggcaattaattgattggcgtgccttcagttgaaaatacaccaaatagcacgacccaagaccgtaatttagtgacgcaaagacccagggaaaagatctttcactcaaccgggtctatacagcactaaacgtccaccggatgaatcgcctagaacaccagtaagcccaccgatctgcaatctctcaaacccgaactgccagcaattttaattcaagaagggtgtccacttacttttattaaagtatatacacagctcgtgacactaaggtttgaatgaagtacgtgccaagtgcaaggttgtattggcctcacgtctgaaagcgggtgcgacgggaatttgatacgacaaaatgagacccgggagactcgagggcgaggcaagggctgacttgtttaattaaatactgcacctcatcatttccagaggcaataagctaagtttgccatctagttaaaatgaattacaatcttacgagtctgacgtcgacactcacaaaatagagtgagtcttagatgtacctcgcggaaatccgacaaaaagtggagcacgtcaagcgacatgtaagaaacgaatatgcctatttaggtaggtgattaatactagtacatcatgcagtcatgtagtagatgcagtaaatgcagctactgtcattccatgctggaatggacgttggaggcaacgggagtttagggtttggtgatccataggcctaaccatcaagctcaacttacgcatcgagattttattcgacttcccatggttcaattcaatcaaccgtagcagccatagagccgtgttgcagtctaagaagatgccctgttccaaaggaagtgcccactatcaatctgcaacactgacattccagatctcggggagagaatcgaggaatgcgccccggatgcagcgcatggcttggcactgtcgaacctcactgcttacatgcagatgtctctaatcgtgtgatgatggtcataacaagaagataatactaacagccttgaacaactagtatttagttcagcatatcccacattcctgaacgcccaaggatggtttgttttgtctctgttcttttcttactgtttcatctcctcaccgcaagagagacaaattgtgccatcccccactgctcaggaatgtgcctcgaccatgtggaccccagggattccagaagacggcgattctgtggatgttcgaagtatgcctgggatgtgggttagatcgaaccggtttgcgaagccaataatctccagatgcaaataatggctattggacggtatattgttttcatatcgatgtttacaaattcacaattggggtgtggcccctagcagaataatgtctcaggttgtctcattgaggccaatccttgagacgcacctttcctgcaccttttatcttgacaactgtaccaagctatatacatccaaatacttctacattcgctagagaaaaaatataagggtttggctttctcatccctttcttcgggacctattgactttgtgctcagacacttccacgtttttcgcggacttattttggaactgaggaatgcgagaaaaaaagtaaacctaagcgagcctgatgtctttgccgaggaatccgagatacagacgtacttcggttggagcctgccttggacgtccgaaaggcagccggtcacgcctgaggggtaattagaaagcgacgaaatccacggaccagtatcgtacagacagatttgcgctttgagaaggagaaggccagaaatagcattgacgcaagataattatggtatcgtatacaccgagtaaatgtatctacagctccgttcccataccgctctcaatcatgttccctctcggtgcgccgggtgctccaaatgcgattagtcttagggactcggttgattcttacagatgatagcgattgcgcctcactagcgacctagatataagcccagaagtaaaaggacttgtcaagtccaatgaattctagacgacttctctttccagacacaataagccaattctatgccggctctatattcgtgtttgacataaacattgaaccacataaacgaggggactggaaaactaaataacaaactcaatcactgcgcgggaggggaataacgagggacaggcccacaacaggaaaacaatcatttcatacaaggatatcataaccatgaaaatacatcagaacaagatcgtgaaatgcgaacaaggtatcaagatcgtaaaacatgacgggtcaaagacacatgcagaaatggaatggagtatactgacaaacggcacaaggggtagatcaggcgaacctacacaaccagcgagatcaaacgctctgtgtcggatggacgtccagcgcggacgcgccgtttccgttgcctcgagcggggttgggaccagggagccaggcagcatccaacgggataatcaagctcgggttgacgtacttcctcagccgcaaatcgaggtcatgtccgccaatgcgtatcggaaagctatcgcgatctaggcctgatggcggtgagaaggtcgatgaaggcgagggggagatgtcgccaccacccggctggtcccgattgatactcttgagggcaatgaacttcatcaggggctcgtatgtacgcccaaaccagtatgaaaaccaaacggtgaagcctagaagtggcaccaggagtagcgaccgcgtgatagctcggcgcagagccagaacaccaatcatggccagctgatgaaccaacagccccacaaacacgcgattgcaaatcatcggccacgcgcggccagtggaatgttgctggtgatccatggcatatagcagttggtatttgtagataaatttgccgactgtgaagtagatcagcccgaataggcagatcagccacgagctcgggaacacactgtaaaccacacagatgactaatatcaagatggtttgcgggatggagaaaccgtagctgaacttgggaggagttgacagctccgcatattcccgtggcgtgcgtgctgataggaattggaaggggtagagtgcgacacttccgaattcgaggagtcggaaggggaaaaggcccaatccctgcagaatcaacaggttgatgtagaatggagccaggccttcgagggaattggccaatgcgagggcaattgttgtagaatctttaaatgcatcccgaagactttcccagaacccatagaagccactcgctgttccaaacacagtgaacagaaggaacaaattgaagaacgagaagaagaaattcttggagatcacggagagctgaacatccccacgtgacaccattccttggttgttcgagagccctgcaaagataattagcgatttgaactacagaacgggtatgttcaaagacttacactcatacagataaggcacagctactgtcaacagcgagaatgcgagggtaggcaatccggtctgaaccaacgacttgacgatcggatgttcctggaggaattctgccagccgagggacaatcgtctcaagtgtcttcagctccagcaatgaggcaataggaaccaagagcacagaccaaaacacggtgaggaatccaatgaccatggtgatggaccatgactgaaccattcgtcgagtacgcgacaagtaagtgtttttccaaataacatctgccggcgccggtgcaagtcgagcgaacatttgcattgggtgtggatcaaggatcgcttgaacaagcatttgagacgcggcgattgactccatcgtgacgaaagcaatctcggtagtaggatattctttctctcgggcgtttttgatatgttcatcaatcttccgtagcttctcctcatagtaatcgattgcatcgatcatccggaaacgaagcttcaatggaccataccagatacgagtcttgggtctttcattcgaatactccgcgacatgctcgttctcgtgtccggacaggagtccggaccgttcatcgtctgcatcacggggttgttgctccgtcagcggcaatgtatttccatcgttctttggtcgcttgtatcccatatgttttgtccatgctctctcaagttcacgaatgactttcattctctcgtcgatcaattcgtccagctcccgccactttcggcacaccgtgatactctccactttgccgactcgcaggccttccacgaattctttgatcttatcttcggttcccaagtcattcgggattccggacagacgaatggtgcgatcagtggtgcttgtctgattcccgagataggattgccgagtgcgaataattacttttgtctcgtcaagaagcatgtagatggccaagccactgaagacatatgcgaacagtacgtatatccaaagatatccagggtctgtaactggcttttctttttcgattccaccaagtgaactcatggtatcattgccagggacgttatcccagccaggaactccatattggccggtgtatttgtagtgcatagggaggatgatggcaacagcgaagataaagacagccagaagaaatcggatcgcaaacttgaagaaagacatgaactgcccaaagactcaagtcagcaagtgtccatgcattgtctggagaagccatagcattcgaacataccacatatgcatctaggcccgcagactgcagcacctcctcttctgtaatccgatgaagaacgggaatccaaccaaaaagggtatctggaagctcaggtaactgcgaagcagcatttctttgtcgtcgtcgggcagcatacaactcggtccattttggtcgcaaaatctataagcaaggcagtcagcgattgacgacacctcacagtaacagagatacttacacagaacgtcaaaaaggcgatgagaccaagcgcagagctaattacaaactgcgtgtatagatcgcgctgttctttcacagggtcgttgggacgccatggccttttgcttccgtcatcaggcttgtcggcaagcaatgtcaacgcagcacaggctgctgatgccgtaagagacatgaatatgttttataagggatctccgcacttcgggtttccgtgatggcttcgacgagcgagtgctgtcggagctaatggttcgtcaagggcatgcgggcccactgaaatgactgacgtcagggggatgagatggtcaaatgttggagacgattcgatttctgttgttgccgcgattgtcgagtccttcgatttgggtttcaaagggagattgtgaataaatggggagtctccccctttgttttttgctgttcatcaaaccttaaccttcaatgacggcttccggagccggctgcataactatggatgagtcatcatttatacgcacccctgggcataatccggggattgcatgatcataccaacgccagatatctacattgactcaggtttgaagtgcgctctatagatgatctattttgtgtcacagcctgacgtggtgcaaccatgaatccagtcaaaagctgggaaaatctttcatgcatgatatctaattatgcgatatgttcaggggaatatccaatcgtttatctaaaagccccaatccaaatttaggaatgcatcgatgcgtcatagtaaaggtcaagcagacatccggcggaccaggactgggtgggtgactgtgtttttcgttagtatcctgtacaaatgagaaatttatcgaaacgaaagtaacttaccgaatcattacaatactccccagtcttgttcgtcaattctgttagccctttccaaggactctcttgcaatgccttcttgcagccatagagtcgtcgggtgacttgctggaagcattcagtccgttctccgggcgtctttcggcgcaggagatcgaaatgcaataaagcacggaggaagtaaccgcgttgccagacccactctggaccctgatggtaattgcgacccttggcagtcgcgaagtcactggagtcatcggagttgatgtagtatggacggtagttgagatcggagggatccagtgtcgccatacccacagggcccacgattgtggagtcggcaattgacagagcgatcagagcctttgcaggcgtgaatagatcccgagcgactgacattgcgatggggaagttggagcggagctggtagtcttcgtagggcttgccagacttgtacaaatccttgtagattcctcggcggttgacgattttcgcgtccacatcgtactgactatcttcactgggatcaaggggaacatagtagcaccgctcgaagttgtccttgattttgcgcgcccattcagcaaaagtaatcttcttgccatcggagatatccacgccttcatggggatacgccttggattcatgcagacgtgccacccacgccagagcgctgtaggcgagaccggtaatctcgatagcggcaccatcgcggggcgttccagggacacctttgtttccagccttggtactttctcccatcttgtcttgccaagtaccacaattatcctgattgccaccgaaaatcagacccgtttcccagtcaaccttaacgtcgatctggaaaccttcaggcttcatctgacaatcaaggtcgggaccagcgttgtattctctgaaagaaatgccagaagcatgtctttggaaaacttcctggacgcattcgagaagagtcggagactgagagtatgcccgagaatcatcgaaggggaaccaagtgtcgtcataaggcaagaatcgtcttggaaccttctcttgcaagatatcaatgccgttgggtgccatttcagtgaagtcctggatggcttggaggaagaaccagacagagtcccgagaattgtatcgtggcaattttccgctgctcagcaaattgggaatcatgccatgcttgattacacttgcaaaagcgagaatatgctccttagcgtcatcaaagcgttgagtgcaaaggaacaagccacggatagaaatgaaaatatctcttccccagcatcttgtccagtcaactgcaaaatgaggcagtccggctgcaagactggggaccatcttggttggccacaaggatgcggatttcacatagccagtttgctgtacgctgaccatagccaattgatgaatgaattcctggccatgccgcacgttctctcccaggagatgaatacccctcttccacgcagcattgtaagcaacctgcagaacgattgcgaaataccttgggaaaaggaagttgggcaagtcgcggacagcgttgaacttctcacgaagccatgcagcaggagttttcaaggcgacacatccttccctagtagccgccctctccaggcgaccagtgatgtagtccaaagcccactgaccctctcgcaagtgatcgcagagcgggtggccaatttggttatacttgatgatatcctcaagaatactccaccaaccctgaagaccagcatagaccataggttcaagctttggaatgctgtaaataccgtcctgaccgtcgctagaatctctctcttcagcttcgcaccggtatagcacaaagttcagatcaatcaagctgagctcagagaatgcgtcgtctgcaccatcggcgaggttgttttcaaatccattggcatggtctgctccgggaatccatgtctcgaaaagagcaatagatccgggaacaagggaacccagtacggagattttgagatctttgtcgtcttgctcgatcactgcaccttctatatcccgggtatggctgggaagacctttcaaatacttgtcatcgcctaggatcttcgcctttgtttcatcactggcatcaacctcaagctgccacgatccgatatgcttggcactggtacaggcaatatgagttggggcgagaatcgcaccactctcattgccagggaatgcggtatgcgcgaccaagaagataccctttctggttttagggtggactcggtgcacagtgatgtattcaccatcgtgatgaatgtgagtttcgtcgtagccttcaactcccatcatagtgtggagttcattcagaacctttttgacaccaccaatcccaccctctccagacccgacggctagagtctcggaattggaagagtgagaggtgtattgtcgagtctcatggacaagatcaatgagtttgggatacacctcatcgtagcccattacacttccagtcgcggaggcacacattgccacaagtgcagcatttggaagagtgtctcgagcatcgcgcttctgggcagggagttcattgtcatgggtacagtccatgaacaaggccggaactggacagggccgaatatgagtgatcttttcgccactcttgcgagacctagctgacgcaatagcatgactactgccggcagaaggcaaatccatctcgaagcttccgatcggctgacccccatgacgatgaacaagacgactcaactcttctgtgctccaagcctgcatggcctcccgaatcagagcattgatgcccagccgtttgacgaagacatagtcggcctcctctgagcctgtgaatagttccgcaaacacagtcaagtcaggccggaccttgcgagcttcgtccagcaaatgttctgcaaccactagcggtgtcgaatggcaattatcgattcggaaaccactgaagtacttagccatgagacgggtatactgcgacatatagtcccagaggaaaggattatcttcaggagaggatccgtatcgaagttttacacaatcaccccacacaataacttcgcggcgtaagtaggccctggaatcgggcccggcattatctttcatcgcgtcggcattccagatccaaccgttattgactaaagccagggctttagggtcgtgatttttcgtgatatcattgagaggaaggcgggtaaagtaagtctcgatcaatgggttttccttggtgacaggacccatcttgggaccatgatcctcaattctgagatacttgatacgattgaacagttggtccatgatagcatcgacgtctgcatcatactccttgtagaatggcaagttggcctcatcgagtatgtgggacagggcgtgttcaacctcagcaaggtcggtgtggcccttatcgtaatctccaaatagcacatttagagcaactgctccgaactttgggtcgacggcgcggccaaaacgtccgcgaatctgctgaacggtcggaattccaagctcgcggagaacattggcttgttgcgtgagcgaccagtgtttgaattgctgcatctcgccgctttggacaagcgcaggatcgatgtctgcattgatccattcgtctataatcttcttaacgtcattctttacgtcgagaacgtagaattcccatagacgagttccatcaatggcttccttgcgtgcagcgttcataacagtcactagatcctgctccgttttgaattctgtcggaagaccggcgtccttgaggctatcgccgaatttcaaaagcgccgtgtctagctcgagggctgactccagccatggcgcggtctccacactgtaaccagactcgggatgctcctccagccacttgctgttattagctgtgtggttccataccacatcagtcaatgtgagaaggccatagtctttctccatcttcgcaaccaatgtagcgatatcatcttctccattagggaaaaatgcgggatcgaatgttaattgatcaaaaatactatagggcgagttggacgagccacggtgcatcaggggtgtgaaatgaaccatgttgtagttccgctgaccgatcccacgaaggtgtctatcccagtctgttggatattgacccatgaactttgagattaccgagaagatagagagtgcattaagcggcaaatctttcccctgaacggtaagtttgggcgacacatcaatgtagtgaacaggtgtcttcgtcggcttcggggtagacaccttgtcgaccgagaactctggcagcggagaaaatgttgtatagaaagcaaacgcgcccgcgaatgtcacaggaatatcgatttgaatgttctcactgaagttgggctgcagtctacttttattcagcaactggcactctcaatttacacaacatataggaagaattgggatgatctacctgaactcccggaatgagtgacgttcaaagggctttccctcctcgggaatattcacccagagactgccttgtcggcaaatggagctcgttccctcgatgatgaatcgaagcacatatccggattctggcggagaggccaggtaaatgtacccaccaggcacgtctggagaaccgtcatccttcaaaggaagcaagtagacctgacgtggggaggccatcgcgacgggttgataacgattaaacccaacggattgtgagagtacaggagaatctcaaacgattcgccttactgtcactgcaatagtgaagaggatagagaatatttaaggagagaaggaaagaatttaaaagcagggaaggaaaagtcggaagacaagagaacccagcgttcccctcatatgttcctggagaaagctcagaccgcgcggggaatgacatcatgcactcattttccttggtaagctatcaacaccatctacgtcgctatgcatccacttgttttgacagtcttttaaagattcaaatcgtctagtaaataatcccgcttcagttcataaatacacgccatgaaagtctatacacgccatgtccaatgccgaatccagccgtaattataatcgtgcagaattgaatcgagcgccattatccttaccattggaattttgtgacggagaaactggggctcgggcgtgaggggggctagagagagccaaatggtttgataagtaacatgaacatagaagtagaggacattcaagggctttttaccgctcaatgtaagaaggaatctcctcgaccttcatggtcccctccaaaacacctgtgcaatgttagcttggatcgagccgtcacatgtcaaaagaacagtatgaaaaaaaaaagaaaaactcacggtaaacagcagtgaacagagggaactcatcctccatgccttgtgtccgcaggaaactgttgacttctatagcagtagaagtaccttgcaacttctggccgttgagctcagtcctctcgatctcctcgataggctgattgcgctcaacgctgtacttggcacaccggaagttacgaccgctgctggcgctggtgatcaagtctgccacaccggcgctctcatcggtgaaggtgcggttgtcaatcgtggcgctaaagaatgtgtctccaaacttgaccatttccatcaagcccacgcgcatgatagccgccttcgcgttatcaccccatcccatgccgacaacccagccagcggccagagcaacaatgttcttaagagctccactgatagacacacccgcgacatcgttgacaacacgcacgtggaagtaagggcggtggaagagtgttttcagcacgaggtggtccacaggagggtatgctgacggcagggcctgcaacttgacctccgagatttgacccgtggtatccttgtgctggaactccaccaagttggttgtggaggaagaaggcgaccgctcgggagtgggggcctgggagtccaagtgtggggggtcataggcgatgctggtctcggaccacttctcttgggcgacctcaccggcgatgtttgcaccagacagggcaccgcaataaatgcccaggattctgccaatggtctccgagaagaggtggatacctgtactgttgacgtccacacccttgatgcaagagatgccacgagcgtaggggagaatcttgcccttgatttgctcgcaggtcttgataataaactgatggggcaggttgaagatgagaatcgtgctgtccttcaccgcatcctctagggacggattggcgtggaggttgactggcaactggattcctgggaggtacttgacattctcatggaccttgttgatcacctcagtcaatttctgagggccggcgagtgaggcattatagttcttagacgtcttcgggacctcgacattttcctcgaatacccacatctccaccttctcctcgaagagattggggtttccggccgcgttttcggcaacgatcttagcgatggcgcagcccctgtcgaggaagcacacaattagcacaaatccacagctctttttgaagactaatctcttaccagttaccggagcccaccaccgtgatcttgtgcttgcgctgatgaggagctgtagaacccatgatgtgtgtaggagaaataattgatctgtgggaaagtggtctggagaagggtttaaaaggcaaagaagaggccggcgggggcaaacggggtggaataatgaatcgggtctggaaccgggctgaccgaggtcgaaatagggcgatagaggtgtgaggaacgcagatccgacgtaggtttagacgaatatccatacaagttatcgttgggaccccgataattccaacctgtttcgggattattgccttctgatcacaaacttctgatgtcacacgcaaagtcgacttcggagatggcaatttagcgcataactttttgttttcgcctttgacacacacatgaactaattagttgaggagagagccaaacagcgttgagttcctgggcaaaggagtggggagagtggatgcgggcggtgaacaattggagtcgacggggtttcgcttttcccgtcgcaatttcgtcttttcgttaactccccgctgtagatctcacatgtcaacatggtaagatgcactattacttatcttgttccactttcagccggttaattatcgttctatcttcacaggcccccattcgcaaatcaatgacgaaaactgcctcgggcagaggtgcgatagccaaacctagtgtctttggtgacgaatttcgcacgagcaagagggataagcgtcagatcaagcatgctgccctcgtgtctaagatcgagaaaaactctcaaaagacccccaagcgtcgacgagcatcaaaaaaactcgtcgccaacctcgaatctttggccgatgccttgcccgaagctgaagaatccaacgatgccgccagtcaagtgaatgtcatcaagcagaagaccctgagacacaagccaggcgccctgaagcgccgggaaaaaatggaaagattggagcgcgaccgtttcaacaagaacctgaccgagatgtccaacatcacatcagctccggctgccaacaatggcgaggcgagtaccgagtcgaacccgacggccagtcggtggtcggcgctccgtaacttcatctcacagacgatggaacagcagcctgtgttcaagacgaataaataagggtggctaggatgaaaataaaaagattcttggtgattgaaccacgactccggttgctgctgctggcagtgaatatctgtctcacaagtgaattctggcaatgacaatccaaggacaatgctaaaggttgagtttaggcaaataaactggagtgtacgacgctcaaccaaaacacgatcggaccacttgcttctataggatctgaacggtgaaatctacggtgccaagcaggttttgcggttcaagctcctatatccctgggggcattcaacgccttctggggccacagacgccatcaaacagccctcgatattagagaccaataatcaaatacccatgtatttatcttactaaattactgtctttccactcgcatgaatcagaatcaaatttccaatagctgaaatattgaacgctatggtttgaactaaccagcttatgttatcaagcacaattccatccatagttaccacccacaccgtttgttcaagggacgtcgtaattcgtcaccggtacaagagttatctcccaatcttaatatagtaaattatggatcagttgcccgggggttgctcttctagtaataggaccttcaagattacatgaagcacacaacatatcttaaggcttcgagcatcaaataaagcaatcgctctatcggcatactcggtacatcgttattgtctttgaatttacccgccggtccacccggcctcttcatcggcccgatgactcatcagataagatcacctgcggggaaggctaactatccggtatctaatccatcgctctccaattctcccgagatccttcctttaccttgtgactttaaggttctctacccacttcttataaaccgcctgtgatccactggcgcccagcaatgctgtggcggcacttacagcctcgcctcgcggcgaccttggctcgtcgtgacattgtccggtgtcggcttcctaaatcatacagccggtcaacacgccaactgtctagctccaacacctttcccacatcgtctcaatttaaccggtcagaatttacaacacaaccatttactgggagctacgagactggaggtcctactccggggccattaggatcaaccccggccttcggcgctccccgcatcacaccgaaagtcttaaagcaatatcttgatcaatatgtggtcggtcaggatcgcgcaaagaaagtgctcagtgtcgccgtgtataatcactaccagcgcgtgcaagagttagtgcgccgagaggaagaagcagccgaggctctcgcgaggcgtcagcggagggaagcactcgagattcatcccttagacggtatatcacctattgagttttgcgctttcgctcattttctgattgatttttcgatacagcagatgacattgcaggcgtgcgcaagactgctacaatacctcaagcccccaaatcccgcccagacacccccttggaccaagcagatttcgccgatacgtcgccgctacagcttgaaaaatccaatattttgttgcttggtccatctggtgtaggaaagacacttatggcaaagactctcgctcgggtgctttctgtgcctttcagtatctccgactgcactgtgttcacacaagccggttacatcggagaggacgccgaagtgtgtgttcaccgacttttggcagctgcggactacaacgttgagcaagcagagcgtgggattattgttcttgacgaagtggacaaaattgcagctgcaaaggtcagtcatggcaaagatgtcggtggcgaaggagtccagcaggcgcttctcaagatcattgaaggcacaaccgtgcaggtccaggccaagccagagaagaatccccgcgcaacgaatgccccgaatagctatccctccaacagtcctctggggaatgggtcatttcaacccaacaaccccaatccagccgccaagggagaagtgtacaatgtgcgcacggacaacattttgttcgtgttctctggcgcgttcgttggactgcacaaagccatcatggaccggatatctcgtggatccatagggtttggtcaaccagttcggaccacctcaaacactagtgatttccctggctcgccaaatatctctaccaaccagccacttccaatccttccgggatctgaggaagaagcactatacaagaagcacctccccttcttctcctctacatcaccagccggttctggcgccgagccaacctatttcaacgcactcgatctgttaacaccctcagacttgcaaagctacggcttcatcccagagctgatcggcagaattcccgttaccgccgctctctctgcactttctcaatccttacttatgcgcatcctaaccgaaccccgcaactcccttctagcccaatacacgaccctattctccctctcgggtatcgagctgcgcttcaccacaccggcactccacaaagtcgccggcaatgccttcacaatgggcaccggcgcacgcgcgctgcgaactgagatggagaccattctcagtgacgccatgttcgaagcgcccggctcgagtgtgaaatttgtcctcgtgaccgaggccgtggcagaccgtaaggaacagcccatctaccttgcccgtggacagggtgggcgtttccatgctttaatttccgccgaggaaagtcaatgggaagcaaagactcgcggagaaaagaaagaccaggcccaaaagagtaaaacgcaagatgatgcggatggctccaatgcgttgaactcccaggaccagaatcgagcaactggttaagtgtaaataaatggtatactttcatctcaccccccggtgactatgtatttatacatttccgggtattttttcttcgtatcccagttgcattggcggcatttagcgtgcagttcagcaaagcaatacctttggaagctccatacgttcgtacgatcggtctttcattactgatcgaacgtggatctcaattttgaatggaattactatatatgagtaaaagtctcctatgaaacttttcacaaaagtttgggttcatttcatggcttcatggctttctaggcatagtacaacaagaacaaagcaaccggggtatcataaaagattgtacaaaaagagaatatgagagcaaccatgctgtttgaagtagcctgctttgatcggaacttcacaagaatcacttgtagggagcagggtactgtttcgtgccattgccgttgctgcttgtgagggtcgattgaatagaggcattggagttgtgagatgtccaattcggcgtctggggtgtgctcatggccaccggggtagttgcttggctagaaggctgcagcttgggacccgacaggtaggccatgagggtcaatgaatctattttgaaccgtttaaagaaatggccgaaaccacctcgcatgacagtcatatgaccccacttgtcccaccgtgccccagtgggagcactgagtgatgtgacagcgacgaagttgcggaagcgtggtatgttaatcaatgaccaccctgcgaagaattcgatcagatgatctgcatcgcgttcaaccttgtccttgattctgaggtcgtggtgctctgtacgactacagtattcatccagagagggtgcgataacgttgcttcttgagttgtgatgtagactggctttatcaaacaaagctgcgcgaggatccgtaacgttgttcttgatgatcaacgtgtagatgagcaacaggctacattcaggttagtaagaagcttgagctaaacaacgatagaaaggtatgacatacagtccatgatcttgcgagtgattttcgtcaccgagtctcatttcgatccattcaagtatcctagggggaaacattaacgtccaagatttccgtttgtgcttatttgcattccgaatccattgcagagtgaccgccaccccttttaggtctgtcaacacatcttcagtgagaagtatgacaccgccatacggaaagatacgtagacggtggtcactaggtgaacaataccggggatcaactaattcgagtggtctctgaatgcgaaccatccagaaattgaacgagtgggcaggaagcacagaattgagaggaggctgcaaagtatcgtatccaacgaatgattcgtgaaactgctcttgattagttgtctgacaattgtgaacgtgtaaaaatatcgatcacatactatggctacaccctgtctgctgttgtgcacaaattttgcccaatctccagggctgttgcttgtgaaaagaatcttctcatgatacttcaagtgcacctgaagaagctgcagttccttttgtatttcttcattgcctaggggaaagtgcaaatagaaaatatctgcctttgatagcttcccaccttcctcgattgtcgcaagttcttccacattgattttgtgggctttcatgaaatcttcaaccgcttgaaccgctcgagcggcttgctcatcttgtgggtgagggatagcgcacattgaattatccctgagttcacttgtgggcggaaggctttgggccggcgctggggccagcgtctcccgcgagtgcacggatccactcattgttatatcacggtggaagtccgaccgtcttgggggactgccagactctaggctatcatccctaggcgccttgacgcgcagtgaaagcgatgtatttggcaaaaagccatgcggtcttccgtgaggctggttaggtccacttgaccagagaatttcgatcggtgcgagcatagtgcgagcggcaacgagtagaggaatgccaggtggcacttcatcatcaggatgtggaaacttgaattcctgtgacccgtatgaccaagcaaccaatacaattggcggtccatttccgtttcttctcctcggaggatagtggatggcaatgaggtcgtcctttcgcagattctctgctagatgaaacaaattttcgttggtgtcgctgaagccctcaacccaacctgtactcaatacagaatttgtcgcctatagccaatgttagcattatataagggacaatatacagatctggtactgacactagattcgcatagtctctcgtactccccgactgtgcataggtgtctaaaccaaacttcaatctgctttgttttcgggttcttggtcatgactagagatttctggatatccgtacggaagccgcataatctaaaagcaccgaggaatttccggtccgatcccataaacatattaacaagagcgtctcccttgacgcaccagtatttaccaatcttaatgcaagtggacggccgataagcacgaaccggcatccttggaaccaatggagcgatggaaagaccgggttgagctggtggtctagctttgggcccggtgggaaccaatggagcgatggaaagactaggttgagccgacgatctagctttgggcccggtgggaaccaatgctggagcattgactgatggattttcatctaacccagttgagtttgaagattttggagcaagccgataatgactcggagacgggctacgaggcgtgtaactatcacccatactacggagggaagaccttgacggccaaccggggggcggtgaccgtgatcgccgataaggtggtgatggtgacctgcgagaacgcggtgaccgtgacctgcgagatagtggtgaccgtgaccatcgagaacgcggtgaccgtgaccaccgagatagcggtgaccgtgaccaccgagagcgcggtgaccgtgaccagcgagatagtggtgaccgtggccgtcgatagggcggtgaccatcgagagggcgatgaccgacgagagagctctgacggtcgataggtattagccactattgtggtgttaggctgcctgggggagttcgatctatattgttggactgtctcacggctgtcgtgcgagtctcgattctcagtaaccctctcgagattgaccattgcacggggcttagttggaatggctggcgagataacagtaagactggaacccgagagtagtccagcgtctttcactgaattaccttctgcacgccccccagatagaatgaccggagggaggaccgagccagtcgaggccggaggacaggtagatgtgttgatattggcctgtggtgagggacggggagctagtgatggcgcagtaagggcggaggttgaccgcccgacaggattcgtcaaaggagcctcacctagagacgaggaagtagaggcaatagaatctacagaaccgggataggtgaggttggtctgcggaatggactttgactgagtagattgcggaggggaatctagagaaccaataggtctctctggatctaagccagacgacgaaactgacctagtggagcctaagtttgaagagcgagacactggaggagccatggctgacgagggtgcgagaagaacatgttcttgtggctgctttgcagctttatcgtctatttggccaatatgtgtctttagtagaccggtcaaatcgactgggttctcagaagcagattgattttgggcttccagggttttgggacttgttacagatgggccaaccactgagatggtgctgcctatgttcatccttggtggaaattcagaaggcttcatcagctccatctgtgacaagtccggtggtcgttcgccccatttcttatcacggtatgcgcgcttggcacctgggcctgtggcgaaagaagataatattggctttgctgcttgtggggggcttttctggcgcgcagggagtttgtacttggcagtaattcttttcgcaagctgagatagtcgcgagtttggaagcttgcttgaggttgtttctgtctgtgcaatggaggttcttggttttggaggctcgttcctagatgttgtcccagtaggaggtgctgtttgtagcagtgattgacgagccgcattttttgatggtggtggggtttcagctggaacaaacaaggccgaagaagcggtggaatccacggagaggcgattgggagctccgtgagacgaaataggtggttcgggctcatgggcatctatgatatcgggattggccagtcgagataattcagtttgggggaggtttttctgccgtgccctttgctctcgtttgcgccttcgctcttcttttcgcttttttgttttcttctccaacaacttcatatgcttctcccacgacttgagattgaagggagtcaccttgccctccgcaatttgtttctttttctcttcccagccatctagggtctcttccgaagtaaacatttccttcggctcccaactgcatctgtccatgctgtacccagcccactcaaccaaatattgagtgataaagactccttcgtcatcctcagaatctggttctacgtagaacctccgttccgcatggatgtcattcacgagatactccgcttcctcttcactttgggcggtagacgccagagagtcgacatcaccaactccagaggcatcattcatctcagaatcagatgccatggtagtagcctagaaatcgagtcaacaaatgcttcattgtgcagcgtccaacgccccatgccaaatgtgcaagcaagacagtacttgggctgaaactttgagttgcagggcttcggggagagcgaatgcgtaccgtatttcatattcattagatctaatgaaaatagagggataagcccacagagacaatagcagaagtaaaagtaatgcgagcaagagtaacaacaagaaagttgatcagttactgcccattgataaaggataccgcccgcgcgccaaacgccaacccacgtgatctccacactaatccacaatgggtggacacgattaaggagagacactcggcccaggtatcactgactatcccctgctgattctctattacctcccgtgtgttcgctccccttgttttctttctgcctgctgcgaaatcaatactgacatatctgactttcactttctcaaggccacaagtacacatctcagtcttcacttgcccgccacgtttacctgtactttgatactacctttcgagctttactagctcgatcacattcaaaatggccaacgacgaatatgacgtgagttgatttgggaccacgagttcctccatgtctcagaaccaaatgctgatgatgatatcctctacagttcctcttcaaaggtaacctcgccacttcacgccgaggcccgccctcgtcttatcccaccatcccacccccccctttgccccatttcaaaagatccttagactgactgcggaggtattgtggagtgaatagtggtgcttattggagactctggtgttggtaaatccaacctcttgagtcgtttcacccgcaacgaattcaacctagactccaagtcaacgatcggtgtggagttcgcgacccggtccattcaagtcgactcgaagacaatcaaggcacaaatttgggataccgctggtcaggagcgctaccgtgcgattacttctgcctactaccgtggcgctgtcggcgccctcctcgtttacgatattagcaagcaccagacctacgagaatgtcaaccgctggttgaaggagctacgtgaccacgccgattcgaacatcgtcatcatgctcgttggtaacaagagcgatttgcgccacctgcgcgcggtccccacagaggaggctaagcagttcgcaagtgcgttttccggaatcactttctctgtgtggcgctgacattcagtaggcgagaacaatctttcattcatcgagacttccgcgcttgatgccagcaatgttgagctagctttccagaatatccttacaggttggttgtcgactccttggaatttattataacatgctaattcgacagaaatctaccgcatcgtttctagcaaggctctcgactccggagagggtggccagcaggtcctcgaccgccgtcccgttatcgaccccagcaagcaagacagcgagcagaagccgggctgctgctagattacccttcgcaaggacgaaacagcgactgccatgactcttcttttgcgatgtgacattgagatggtcttgatctgtatctgtgttggagtctgaaatttgactgctacaaagatgatacacaggcgggatctgttagagaaaccccacgggaagataggggtctacccaaatcgatgttaccggctgctggattccccttcttcagtcctttttttttttttgctcgttttcccagtgatcctcaacgaaattgatcccctttttctgttcgcttgatatgtttctacgatggtgaacacagcttggctgggcgtctaacattgcggctgcgtggcttttgtatggaaattctcaaattcgtatattcattccacctattttagtgtaattgtacaatgttgtagtcatgcaatcccaacaaccttcgaagagaacagtggcgatgctcgtcattacggttcacgtgctccacagggcaatttacctctcctggccagtgtccactagaagactgacaacgctcgctaggaggggttttatttacaatttacaactaagtgcctcatgtaaattgaatatttcctggagttctgcaaagaaaaatcaaagccctcgcacacgtatgtatttcgataatttcaaaaagtcgacaaacaaatctagtttaggacaatgcccatgtcacgaccagccactgcagatctaaattctccaagctcgagcccacgttcattcatgacatattccagggtgtcaccaaacgtttcaccgttgttgcggaaccattcccctagggaccagacgtactcctctacctgttccttcagcaaagcatggtcgcgcaaccataatatttgaccaggatcgagcttcagcatgtcctgcataatatagtaatgtgggatctcgtcaccccaaccttcataccccggatcatgagaaagatcattgcgaaaccgagacctaaatttggctggcgactcggcataatttcttgggtgagccgtgtggaagaattgttgaatcgaggtatcaggaccattctgaagcaaggagtgaccatgggaagacatagaagtagttgaaagcggtggataattgagatggatattgaacgagagttgctggctgctgtctggataacgcttgcggaatttgcgttggatagtcccattactaggacatatgtgattctgaacaatatcacccatgacgagacgcaaatcctcaatctcggccagctcttgggtggaccagttgtggagcaactgagcgcgctccaatatcacatggcgaagactacgagaatggcgatcataaacaccagaatggaatgcactgtgatacagccataaccggtatactgcgcggcgtaggcgtaatcgctcttcgtcagtgagcgagcgacgattctcgaagtctagtttccattttttgaacgggtagatcgtctcccattttcgtgccaccagaccgagctgaatgacttgtttcagaagggaatcagacatgggcgcatgtcggataagatgagcagcctggctctcattttgcgtcaccacttgaatgacatcgtcaaggggaccatattcggtctccgcgacactggctaggatatgcagtttgcttgttgagttgaggatgcggtgaagtcgatggcaggtgattgataaattcaagacatcggagattgagttgcacgagcgaaatatgtggagtagaagctccgtcgcaagatgatcgattcgcataatggaaatatgctatgtagtttctgtaaagaagaataccgttagagtgactcatgttaaaggatcaataagtgatcacatacctgctcaggggttgttatttgtagttaccaggtaatttgaaagaagatagtggccaatcttcgaggatttatgtatgaatcaaatttaagtcacgaattgaagcgatcaacactcgtgtacttgtcgcgcgtacggtgggtgggcctattggatatagaccccgccgttggggctaacaggaggaagagacagcgtgggatcaaaagtaaacatattggaagagcaagctccttgtagccatgtagggctaaccaccaaaaatgatgccatgatagatggtatcaggaggcaaagagagattgggctgggcaatggcgagggagtgctttatatgacgcttagctaatgttgccccttgcgttcttcaaccaacctgctttccagttattctgaagaaaaagctctctagacagtaatgaaacaacccaaaacgaggaacagatagaaataatcaacttttgaaattaaccaggatgagactttgccccgacgccttaacggaccatgatgaaaagcgtcgcatcaaatatacacatgtagtcgaaacatcatcccgagggatatcaagtctagaaatagcacgacgaaacaaaaaaaaaccccctatgcaaacagcttccttgtgtccaacgcatccaccttccgcacagagttctcggacagtcctagatcggagcgcttggccacccgatcagtctggccgtctcggcgctgggagtaacggccagccttgccctgtcggatgtcgctacggacttggttggggctgacgtactccttgttctcgtagatgacgggtccaccaaagctgccttcgagaatcacaatgggggtcagaacgaaccgggggccaatctcgactagagaaacctcgggcagggcgttgtccttgctcttcggtacaggcttgatagtctcttccccatcctttttcttgccagcctcagactcgcggatctcatagacgcgaatccagatcttgccgtccactccaaagataccaatgatgcggtcgacgaatggcttcatgcctctgacaccacgtttaggcacacagaagactccgcgcagcatctcccgaacaagcgcacggtattcgctaccaggagcgcccatatctggaccttgctcgtcgaaggagcgatcgaacacgaccaagccgcggccgcccttcaagcaattccctgcaaatccagcgccgagctcgcccattgtgtgcaagttgttaagatggaacttaatagtgggaccattaggagggcgcgaaagccagagataaagatcctggccgttcttcttggcctcgaggaagaagataacgttgcacgaatgcaggtcggcaagagagttcaggaggaggttgtatccagcggccttctttttcgtgtcgagcttagtttctttgtgagcatgagggaggaggccgcagatatcggacatgaggtgtcggtggctagagaaaaaaaacaaattatcagatcagtaaatccttctagtatatctcaaggcgcaatattcataccggtaagaagcgcctctggaagtcaagataagtacccgggtcttgggcataaatccagaagcaagctgtttcttcacaacctcagctgcctcgccatcgtcggactcttcctcttcgctatcggtggtgtcgtcttccgcatcgaggagctcctccatctggatgtcctcgtcggacatatcctcagtaggctgtctagccgccttctttgagacactcttgtagactgatgccatgatgacggttgattgtgttaaaaaatggaattgaaattgatcgtgcaaaagacggccgagatcaaaaagttgatggcagaatattttttgtttacaccgccctgaaccttgctatgtcacgtgtcatatgggctactgattcatttgccgttgtttaccgccctgttttcctgccaaacattcatctggggattactcaaccttgctttggtcttattacttgctacccacatagttgcatacatatgtagcctttcatactggccaccttacgatttgcttgcctaatttcactccaaaaggtagactgaaattcaacgaaccgaaaaatatatatttcttgtctaaattgagtcgacaacacaacagagcgttaactattctcgattacagccattttgtttcccaaagattgatataataagtggcagacttgtgcattggctcaatattttgactttgaattggtcaatttggagagctgacgagattcagtcaagtaaaaggcgagtcagtatgacggaaagttcaacgctctttgcaggtttgcaaagccctcttgtgtgaccttcaagccggcaatggtatttgcaaattccaatttcttccgaaaatcccaatcatgatcccgatatacgagaccgtatagcaagccagcattaaatgtatctccagctcctatggtgctatagactatcagtatggtctaatgtgtgctgtggtatatcggaaaggtcaaaactcactcgacgactcccatttcctcagtatgtgccgggacatgagcaaatttgccggtctttggttcaagtgctgcagccccgtcatgaccccaagtacagcacagcaaggatctttaaacgacaggttagattatttctctggggacttgaacagtaaagcctacgctcggcttgtcttcaatgattgatcccgcaagcaatcctcagcgcatgtatatccatttttctgctcaactattagatgtgcttgaaaaacgtcgaaaataaatcttacctgggcccagcccttcgagtagataacaacgtctgctgcgtctgcaagcccctgcaagcctggacgacctggcttttcaatctcaacactgattttagcctctggaaaatgcatccgaatataatgaatacattccaatgtgacatctggtgcacggccctgagtgcgagttagcatgattcatgactagttgagcaccttgtcaacatttaaggtacctcaaaatgaaaccagggtcgatcagttacggcatgtaagggctcaacagctgctgcgaactcggggtgggtcatttcgggtagctcgttgtaattgacaatcgtcctactaccggtggcctggctcgtaatgatgtaactagaagctggctcactgaacgactctcggtaaatgcatttatctagccaaacaccatttcctaggcttgattgtatttgttgagatgccatggatgatttggagggaaggacagcaatgagatttaaagatgattcggcactcgacggcctatattgtaacaattgactcaaaacttccagagtgtttggacaattcccaccgcgccggcgactgatcctggttgcacgtagtttctcatcttcatttgggtaatagggggctctaccaaagcatgtgaatactggactttttaaatgccaatttcaagacagctgaaagaactcacgttagaattgtgtcaaggtagcacgcccctatagccactaaagccatgatgataaatccggcgagaatatatctccgtatttcggaaagaggagttagtattagggccgattgatcgtttatctaatgaatgtagttgatcgagtcgaggataaccgctgctttctaaggttaggtccacgggtggggttaaattagtcagcttgtcattaagctcactcgtgtggtacaattgtgtttgtcttagcacaaaaagccgtttcctagttttgcagtacataccacataaggttcacaatgaatcaaagagtctgaagctttcgtacacaatacaggaaataatttcatgtagtcagtatctaaaatagactagcaatcctcttcttgccactgagaagattagtcgcggactagggtaatacgcatcacgtgctcatgagaaagagcgcacgtgcccctttgcttaatacaactacctaaccttggaagtaggtatctatttgtcttcgcgtgctttctaaaaagccataaagaaatgactgtaaacatcaagtttcattgaagtgcaggtataaagaagtaggcgggatactgcaggacgaattgggggttgaataacgcaaactagattgctatacccgtacctggaggcatgcgattcctacaggtattattgtctcctacatttgcaaagtacaaagcaagcattgatgtggctggcaaacaattctcatgtcctaatgatcctttttcattctataccagttatatagccgatctaaactgttcatgaatcctcccagtgtcctcacaacctcatttttatcattctgtcactgagaccattttttcaaccatgggtcagcggcacaaagttttagagactgacactcccactgctaagttcctctacacaatcatcaagcaattggacttgaagtcggtcagtttattacccaactattaactgaagattgatttaatcttatctgaatatgataggtcgattggaatcgggtcgcctccgatgttgaagtctccaatggtcatgccgctcgtatgcggtactctcgcttccgacagcagatggaaggaaacacaggggcaagcaagccaaagcgaaagagcaagaagggaaagaccatggatccacctgctgagatgcaaggcatatttccaatggctccgccgctcatgatgcccaccatggcatcgattgattcttctcttcctggcaatccctttgtaaaatgcgagcctggcattcagggtaatgcgaacctacagagctttatgcaacaatctccgcagttgatgttggaggctagcgccgaaggacagtattactttcctcaggattttgcctcgatgcagttccagctggcgtcaagcataccatcagcgataccatcacctagccccgcaagatcatcgtccttcatgcaaaatccataccagttcccgacaatgccaactggctatcctttttcatcaccaggcactcaatctgggtttgatttgcgggactttgaccaaatgaaccctttcaccagttctgctccagccatcagctgggaaccacgctctccttctcgccaggaaggcccgactatgaaagccgaagaaggacaaaaacagaccgaggaagaaatgtcgagcgcaggaaatcaggaagatggtcatgttgttgtcaaagttgaaaagaatctagaatgattatgttggagactagaagggcctcgttcatatgttcattagctagtactctcgttattactaccaactatgctgatttagtcttgtgctctctctcacttgccaaagctaaacatagtattgtgcagaatttctcagaaagcagatggtcatctttatttaggcgtgtactcatagaccaatctgtgatagagtcatgagcgttatttcaagggaggtctctcttttagggaattttttataagagaaggctgagaagccaagcctggaccttaggttaaagttataatgcaggtcatcaacgtgcactaacgcgacaaaccttgtattatgtcactgctagattgccaaaagaatatactaagagaaaccagtcgctgattaatcgatgctattgaacaatgtatttaaccgtctcctggggcgacttttttctcttcgtcatttttcttgcaattgagaattcggtttattttcatatctaccctcattgaaggaggttgtgaacttccttccaatattgccgaaataatgccttcttacaagaacaacccttcggatgaagagtatctagactcgatcaagaaacataccgacaaggaaaccaacaatgtacgatacatcgacaacttcagtgaaactttcagttgaacccacagtcgacatactaaaacttgagccacaggtcaatctcgcccgcgtagccaaggattttagctatgctagtggaaagtcgtttcagaagaagtatgccaagctaaagaaagcacacaatctgaccaacggccatatctatggcgattacaaggcaagccgacttctatccgtcctaataagattgaaactaattttctcggtcagcctgaggcggctcagactcccccgaagaaagccatcaagaccgtcacggagattgtgcgtgaggctggggaagcatctgtaaaccgacgttccgccatgctgaagggcaaaggctcggagaaggataagaagaagcaagcttgacttgtcaaaacttgagtgaaagagttcttcggtgtgcgaggattctacgatcaggctgaaggatgggcgcccaaaagatgatagcctctttggaagtgtacttcttgatctttagatgaaatactgaggagaccgtgtagtaaaattggcgaaaattaggttacgaacttcgttaaaaggcgtcctcttctctcctctcggttctcaaaacggtataactacgagcgagcgaaatgtgaaaaccctaaaatcatagggagtggttcaatttggtttaaaagacaatccttcaatttggaatcgacccagacgatatttattcctagtactttatatataaagagggaataccggcttttgatacttgatggccacggaagtcatttaatacctgaattgaacgaaatttgcgagtaaaataaggtgataccgatatgtatactagcgcattcatcttatcttttgcaacctttaaatattagctgttttgcggtactgaaacgtgcgtacggtcggatggttgaatttaagatacggagtaggattaactatattaataaacttgacttcctcgaagtatacccccttctacgaattgaagcttttaaatcggagacgattaaaaatagcttcttagctgctggtctagtaccacatgtgctgaagaacccagtgtccggcatacccgacgggtctgcttttgccagtcgcactgagacgatgctatttcttgcgccgtcgaccgtcaaggcatccaagaagtcgtatttgtgccgctgggctggctgcaagacgtgcgctgtcggtccggatgttgtcactgtgcacgccgactgtctggaggtgtatctggagcatgcggcaagctatgaggagcggaaggagccgacaaaggaaaaggttggaaatgaggacaaggaaactggcaaaggagatgacaagaataaaaaggatacaacagacgataagaagataaacgaaacggaaaatgccgccctgcagcgcctctggatcgcctcttcgtggcgcacgccgtggaaaaaggcgcccttcccctccctgctccagtgcgacaacgcgcggatgtccatgcccagtccagccttattacaccgccttggtctgcctggtatggcgcgcatgccaccagagctggccagtaccgtcagggacctgagcaaggatagtcctttgtggcggctcaacgcggccgcacgcctggcgctgtcgcttgccgagtacgagaagacggagacctacggtgacgaccctgccgcactgcccgcgtctatcctactatccgaggtggaagcctgggagagaggccggctgctggtacgccgtgtggtatcagacgagaagaaacctgagttggccgaggagaccattgcaacggacagcttcatccgcctcgcgatcgacacgtacggcctgctacacatcaagcggctgccggcccgtccggcctacaacggcaccacgtccgccggtaagctggcctatacgctctgcgaggcgaagacactaaacggtgccatgttcatttccaggtgtgtattggaggctgcaattggtgaaacggacagccggtagaatgctaacgacccagctcggcctcggccgcattgagctccccgcgggcctcccgggcctgcaaatctgggacacgcctgcgccgccgcccatcgagggcgtcgcttatatgcgaaaacacctgaagcgcgtcagccccacgtcgtaccttcatgtggtcgaccttgaagctatcaccggtttgactcttctgtccgacggcaacgtgctaggcctccacgcccacacagtcgccgagccatccgccacagttaccgccgcccgtatggcgttgcccacctcgcgggttgcatagcagtatatgtcactggcgcccgggatcgcatcgaggccgtaggcgtgcgtaaggagggctacagtccgcaactaactcaggacgaactgacgctcatggtgagttttgaacgctgcggacgatgctgtagagaaaaatggtttgagagacgcttatattaattttccccgccagttccgcaagcggctctctggcgacacgctcctcggctacagcttttacaactcaccctccgaaaccatccttaccgcgccttcagaacagccgcgagcgctcgtatacagcgccgtcaatactattaatggcgtcattaccgacgtcggcgtctacaacgtggccgccgcgcccgacgtcaccgcggctgcttgggctaccagcgtacgaaacggaacgcgccgccactgctttaaccactcggcttacccggatgagcagctcaccgaggacgccttccagagcaacgtgccgttggccggcgtcacgtatatgcaggtatacaccaccaaagatactagcctcctgcgcagcatcatcctgacctacgacaatggcagccagcgcgcgctcggcatgtgctgtgtcgccaccgacattgatgccgtgcgcgagtacgcccgccctgtacgcctctgctttaagagtaaccgcgagacgggcgtgacgcgcttgcgtatcatcacagagggcgacctaggtacgccagccgccgatggccacgacgactgcgcaggcggcgaggatcccggcgagggcgaggaggccgatgacccgtatgccgttgtgcgcgcgtgctgtctcatgaccggccgcctcgagtttgccatcgacagcgacaggctttgcctggaacactttgccgaggaggaagagccggacaaggagaaggacccagacgacgaagatgtggatgtgtggtgatgggaggtggacaccgccagcactatcaccgttggagttgaactatcttgtgttaagccattagggaaatcacgactacgacctcacgtctaaaacgaggtaaaattggattttaactcatcctgtaaatctatacaactagctgagcaacatccaattttttttaatttatttcctttactcgcttctattttcaaagttgtgatgttgtcgtcgattcctacttcctcgttaaatatgttaaggacgggcgggtgtgtctttaggggcccgcctctggatttagttttctttttttttgttattttgtgcctccttttccagccttttatggacagtgagctaagccttcaaaatgtatctttgctaggtaatggtatcattcgagtcttcaacaatgataatggggccaatctcctcggccgtgacagactgccaggaagggtctccggggatttcaagatacttgtcagagcggtcgaactctttggcattcttcacaatgctgaagtagtatctcctgctgctggccgtcaataattgcactaaaactcatcaaatccttgaagaacttacgctgcttcggggctcatgttgatgccaatatcaagtgagacattgtcccagtttatctatagcagccagcacgttagcaggtatattggattgtaggaacagattgtgaacatggagatattgtgccgaaactgaattggatgctacgtacctttgccttaaggcgatggcctgttcctcgggcgtattaacggaagtcattctagtaagaagatgaagctgagtcggatgttgttcgatgtaaagaagcacgtgatgctagaagttaatacgtagaatgtgagaagagcgatggagctaaggacttccagttgtctttagatagccattcaacgcgcattttgcttgatctgctttcagctgacaggtgttggctcctcccttaaactaacgtcactcattttgcctacatacagctttggataacaagaaaaatctgtgatgttcaatattataaaagatgacatggttatagtatcttaccaagtagggtgacaaaagtactttgattggcctctcctaggcatacttttgaagaaaattttgatatcttttatatttctaagagaataataatgatatgaagccagacaccttgaagccaagcagtcaaaattcatatctatgtctcttggtaaggcatgcattgcccatggtgtgactcaacataggcaacgggtacagaggtaacgaatttcattcataaagtcaaacaaacagtaggattgaacttatcaaaggggtatccttccaaataaacagaaaaaaaaagctgcaaagtgcatatcacatcacaaatgggtagagacagctaatatcttgacataaatctaagagagatcttcgttgagaagcgttatatgtctgccatgacagattccacgatcttccgcttgtatttcgacaaagcctggtcctttttgtgcatctgagtacggagtcttgtgtaacgctgcttccatgttgcctcggaaacaggatgactagaatcatcatcgtcaaaatccaggtttgccgtcttatcattgtcaatattctcattactcgggcccataatcacgtttgcatggtcaggcgaatccttccttcccatactaggattgagttttgcgagcgtgatttgcatcgaaaactggcttgaagttttgtactcatggaagacggtatagtggatatcactgaatgattctttagtggcagggccattcctatcttcatcgctgcttggtgtcgcacgttcaacgttgataaccagtgaccctggattagtgcctgcgagtccgaaatgatgaccaacaccaagatgtaaggccagtagcagcgaaggagtcccaaggtaaaactgtgaatataatgacgacaaattgatcaccatctccgaagccagagcagccgcctcgttaggagcaagattcgccgtctgccctgtcagcctagcacgaagaagctcggcagaaagtgcatgaacaacctcatcaatggagggattcggagtaatgaccgcatttctttgcccaccagaagaagatatttgagtagtgataccattttttgtggtatctgtggtaacatgttggcggggctcattggacccttcagacccgggaacgacagcaccattcacaccattgactactagtctcggtggagaggcaagtctaacaggcgcccctgaatgttgaggaacctgcagttgaagtctattgggcctcccctgagagatagatgttgaaggattattgtgagttggggtctgaaatatttggggcggatttctgtcaagggcaattgaaggagcctgagtattaggattgggtgcctgcgatgattcccggctaggattgacctggaatgtagaaaaggaacccgatgatgaccctttatttggtggccttcctcggcctttcccggctgataatccgttgctattcggccaagcagacgaaactgcagggccatgtcgtcttctggaacgggttttttcacccgttgacggagtaactgcggaccgtggttccgcagacttgagtacatctgatggtagatgacttcggggaatgatagcagactgtggataactagcaggagaggcatcccgttcgggatgtctccagcgtatatctggattttgctggtccggccttgaaccattcggaaacgatgaggtcgccggtatccaggggtcattggattcagcatcatcaggaaatgcactgaatggaatcgcactctgtgggaatgccacggagtgggattgaaaactaccctgctgctgggcgcccacagatgtgtccaactggggccgcttgattgctctatcttcctcggtgtacctatcctcgacccttttccttcccctctttggcttccattgtggcacaagtgccctgagtgcaagatcctcttccaataatacaccatcgcgagattcgctaacaaaaggaccagatggtgggagctgtgtatagtaagaatgaggcagtcccatacaatattcaaagaaagcatcaatatgcatagcacgcatccatcgctgggtgagattagcaaggtgaaatttgggttggaagcttggcagacgtactttgaggcgaacagtgtactgttgcaccttctgggtgctttgtttcttttcaaggcaaggtggttcaacacccaactcaattgctaattgaatccaggtcttcaactcttcattctgcagccgccttcgaatgaggccatatagggtaaagatgttgaagctttttccatcactgcgcggcagacaccggaaggtctttctcagatctgatgtgtcaaccgaggatggaacattaggattgcagtacaagataaatgaaacataggcgtcatcaatcgtttcatcagtaatatcccgtgacggaagagctcgggaatctgcgtgatcggcagaatctttcataggctgatggcgacgaggatcaaaaactggcggagacatggaggccccggagcgattggccgatgatgggggtatagcagaatgcatgcccctcggggaagactgtaagctcctgggggtttctcttcgctgtaagggaggcgatttgttgatatctatttgactacgagagcttcccaaggaggaagcactctgcaacgtcgattccaaggtcggaggatatcgcgcatattgttgaatgaccatttgcggtctgccgagctcaccacggttggagcgatcggtagagtccatcatgagaggaaatgatgttttcatctgaatcttgacgactcggagtgtcagaactctatgtttaattgtagaatagagctagacacgcgatgcaggcaaataatcatgcggatcctatgtcgcataggcaagccgtcattatcgtcaaatcaggaaccgcagcatagatgtaggctatcttcaacacaaaatgatcggtgaatgaatacaaagagagagtgaagagaatctgattctgaacagcaatgcgccgatggtgtagggttccaggaggtttcccctcgaggtggctggaagcgcccatctttaaagctcaagctgagaatctattttggggccatctagtgctccctaatgaggactagtgttgtggcctgagggcggggttcatgcctggatatcacgtgtagactaagcctaattggcgttagcgcccattggcacctaccaggtgttatcgataagcttgtcgtcttggcattcttccaaggttggcctcttcgacctcatccgtcaaaggaaccggactcccccggactgtggcaaggttcaatttgaatgataattatttcagaattttcgcgccacaagcctagaaatattcatctccggcttgtattgttgcgcgcgcgacgtgcgtacaatgtcgctcgggtctctgctacccactctcttatcctagcgcgaccttatccgtcatggcgccgccctcgagttcgcgctcgaggtccactcgccctacgcggtccagccgcacaaaggtgcagacctaccacgaggaaagctcctctgacgatgaatcggaaggtttgcgtagctcaaggcgtgcctcgttatctcttcgctcgcgaatgccgaaatcctatcgtgaagattcaacggatgatagctttgattttgatggagctgtggaagaccaggagtccgaagcatcggtatctgcgccgatcgacaccccaaatccgaacaccgaatctgtgcctactcgtccttccaaacccaaacgtcctcaacgcgctgcgaccacctcgaagccaaagcagactaaacgaccgaaacccaccagtcaagttgggagagccttgcataaacgtgtcaaggcagatgaggatgacccgatatttctgggatccggtgtcattcctccttggcaaactctcccctaccaaattcttcttgacattttcttgcgcgcgtcgtatccattactcgacgaaagccgttccgcccgcaatgactctgtcaagtggctagtcaatgtcgctctactatgtcgaagctttcacgaacctgcgctagccgcgctctatcactgcccccctcttcttcctgcctacaagagccatgtgctcctctctttgctggcacgaccgcaagagtccctctcgatgaattactctagcaagatcaagcaactccatgttgaggttgaaccagtcctcctctataagagtggaccctacggatacctcgaccttgctcagctgattgaaaagacacctcgtttacacacggtaagactgtatcacagagatgattacacagtgggaatacccccatggcacattgctcaatcaaagtggacttatccagacgccatcttttccgccatcgagacccgtggcattacccttcgtaactgggactggaacagtcgctttttagaaaccgacgagcttgtcagattgatggtgagaatgcattcgctgcgtgccttccagggtctcaggcagctgaagttgctccactttgacaattccaacgaggaaacctccgctgccaaggaggctgctctccttgaagcccttgatatgcttccagagcttcagcgactggattttattgaaagctcattggtcagcggggaaatcctggccaacctaccaaatacactccgttcactcactctgaacaactgtgatcgattgtggtcatcagatctaacagcctatttgtccttgcatggcaccaatctccgggagctcagtctcagccacaatcgccatctcaacatgtctttcatccaaactctggctcagtgctgtgagagcctcgaagttttcaaaatggacctttctatgcatgatgcgtccagctatcacgatgtcgagccgcacttcgaagatctacttgtcgaaaccgaagttcccacgtggccagtgaaacttcaagaaatcgagctcactcagttacgcaaatgggacgacgctactgcggaggtctttttcacctctttggtaaacgcggcaccgcaacttcgtgatctacgtcgattggtcataagtgcaatcctgaagattggttggcgtgaccgtgccacttttcgcgagcggtggatcggtatgctcgagaaggtttttttgcgacacagcatgccgccagaccccaacctccgctcccttcagaagcgctcgctcaaacccaccacattcatcacagcgaatgaccccgatgaacttggtgttggagttgatgatccacggccatccacggctgatggtggcccgtccagttcttctaaacgccaaagcactcggctggcacatcagaagttcaacataattgacgatgctgctagcagttcttcgttggtgcagcctgaaaccaggaagatacagggaatgtgcgatattgttaacattcggatcgacaaccagcgaccgaccgaactgcaattcaacgagaatgattttcttgacgatgaactcagtggcgacgaggactgggctggcgatgacttctagccaatcctagggagttcgggtaacaagctatggcgaagtcccaaccacagtacctttctttgtatttatagccatgtcgtctctcggagctgtattatgaccctagacgaacaggttcttttttttatgccgatatgtttctgggatctggcgctggggtttcttattcatttggaagggggttaaacaggagctactattcgatactctctatacaattaatacctagcgattcatgcgactaagtatttggtgcggaatacatgattgcttgctggaccataggcatacaacatgtcgtagcagttgcgttcatgcgttgttcactcggtctgtgcacgacgatccaaagccaagccccacgagatcgtcttatcggcgagtctcgttgaacctcaccttacatctgtttattcctacacctttgtttggtgtataattacattttatccgttcagatccagaatttggatgtcttgtgcttttcctttcgacattctgacatcggctggatcctgttaggtccaagatggcgcctgaggcccctgcggacaccgcaggcccatcctccccaccaccccaacttccagaaggctggtaagtcaaccccaaaagtcaaagaattttccagctgtattctaacaatcatatcggataggctccctcaatgggaaggtgtcggacggaaatggtattacgtacagcggacgactgggaagtcgcaatgggagattccgaccgaaccgatcgttttgaccccgtcaacaacaccgacgccgagcggggcagggctatcgcaggagccaaaatcgtatccgacaagcaacaatactcgagagttggagtccacggacagaatggcgggcgagatgtactctgcggccgacagtgcgaaaatttccgtagggaatcgcgctcattatgtctgcgtaagcattgcaagaatggcactgatggtgggatagaactcccttggctcccagatatatgggcagtcggaaaatccaacttatgggtcttccggggtaccgggttggtattcgaatcagacgggtcaacacttgcccggcggatatgagcagcagatggctgcaaacgcagccggatatggcccggtatgttcaaatactcgcgtcattcattgattggccgtggcgctgatttgcctctagaatccgttgcaccagggtcctgttggacatttgaatggtgttcagccggcgttctatggaagccaaacacatccaggttatcaaatcacgggtccacaccatataggccaaagtatctcctcatcaatgtggggtaataattcaggtacctatcagggaaacccaggcagttataacatgacacaacatgcacaatccttccaaggattctctgctgatcctgttggattgcataatcaccagccaccagcatcctggacaataaccagcaatccacagggggaaatggcaaggtcaattggcggagcttccgattcccaaccacagtggcaattggaaccacagcaaggtcatttgaatggctctggtgagggtgtcccgatgaacctacacccatcaaacatgactaagcccttctttgggtcttactcatcgaaccagcatgcggagccgtcttcgagagaattcgctcgtcgtgtctcgaatccttctcttgttcaggaaggccaaccctaccaaacttccgcggagaacttccacaaccattcaccgcactccatggttgaacaaggtagattcggacaaggccaggacccacgttcccattcacagcgtactacgtcggaccctgctttgcagggattctcaccgctgcaacatgtacagagtcaatatcaacagcagcacatgatacgaaaacagtcaggaccacaccaagccaatattgctcaaggccatcagcaatatcacaatccaatcgcacaagtcggtgccaaccaatacgtttcgcagcatcaatttggtcccaacggcgggccgacgggtttccctgaaacaacgcatgttcagcaagtcccttatcaccagtcgagtcattatcccgagcgtattgaacattcacccgggcagacaagaagaggttcagagtcacactttgtcagtgggccgtggacctccacgccgccttctactggacagtactaggcaacaatttgttgttcacgttcattattatggtcaacgggaacaaaggttttaatttctttttttgagcggtttctatgggcatgtctatcttctgcgctgtttgtgtttcagtatagattccccagtcgatataattcgttgcttcaattgagttttgtgccaaacaacattccgtctagctactacaaattcccgtgcctgaacacattacagctgcaagcattacacaaatcaagtattaggggacttcttgaacctggaagtatagcggcctacataatatcaggaacgtcatgtaatccaccgcctgggatagaacccaataagtacatagcatgaggttcaagtcacagatttcatcttgatattacaaaggtcattgctcgcgcggaggaaatctcacaaacggcatgtgaggaagattttcattgttctcttcattttctctaccacttcttctttctacgacatcaccaatatctcttggtcgcccaatcatccccccttccatcccacgagcttttgctatcacaatggctagtacctgggatcacgaaagagacaagaaggtaagtttgctcttttcagggggtcagcagcgacaccccccgggatacaagttcccagcattggcaaggtctcggtatcaatagctgataattgatagttgcttttagccattatagccgttcattctccgctggattatgccgcaattgccaaggcgatgggacagggtaagtatatacctgaggactatacactgaagccacaattcccaccctaccctttatcctacatgaccattatacgaactcatctgacgaagtacaggcgacagcactgccgctgtgaagaagcacgtctacactctaaaagcccgccagcgagcaatctccgcacaatctcttgccaaggccaagaccgacaaacccactgactgtggcgacaagggtaccaaaaccaccaccaagcgcaagattgactcgcccacaaagtctgaagttaacgccattgtcgagaatcaggacgaggatgggtttgaacccagcgccagccccaataagcagcgcaagctctaagatcttccgcttcttgggcctggcattcattgggaggtaatgacttacattctgatttttatgcagcgttttctgccgcatagcgaggaaagatgtttttcggcctttggtctagggctcttaggtactttgttatctgcgtgatgtcttgaaacacagcacctttttcgttaatatccatttcccaagaaagacgtagatttccttcgtcgcagtagccccccgatgccttttcagtatgaaaggtactaagtatctacgtagaaccaggaaatataacctcaccgttgttttatgctacttctgacaacccaaggaactgatccaagtaatggtatgttttttaatctttggttatcatcttaagattttcccgtttcttcatatcctcctactcatatatatagttccacttcataaagtcaattaacatcccactcttagtaattttagagatggcgatggaaagtaaaagaggatagagccacttgtttgtgccccgttcagtttcagtcgaacattccccctttcactctccataaattcttcctctctcttagaaacagtctcctcatttcatatcaccactattttactagccggtacgttcattttcaatttaatctatgagcaggatatacttctaagcatcttgagattcaatttatgctcttgatttactcgtcacttttgttcataaagatactgatatcctttgcctagctcgttaacgaccgaagcaacaatgaaggtcacgtggaatgaaaaggccgatgccaaggtaagttcatatttaccttcgttatcgatttaccattggtttgttccatatccttgatagtcttggtgactgcggttcaagcggtcaccttgcggccttcactttgacgttggtgtgacccgtgacggcgatggtttaactccaatgctttaatattggtctagctgtctcaacatcatcgttgtatttcaataattaaccatcataactccagttactggccggcatactcgccaataatcctaccccgattgatttcaatgctcttgctgagtatatgggtgatggttagtgctaccctgagaacccccaactcccatactgcagtctttactcggactatagcgcatattgtttatgttatgcactttattcatggccgtcacccaaccaactacattcccactggtcctctcccgtttgatctttgccatacacaattcaacttggaaatatgtttcaatcgcctataccctctacccaacatttttcgggctaataaaggaactatgctaagctagacttataggagtcacagcctgcgccatccggcaccgggtaactcgccttcgggctaaggctgcagagatgaatgatggcagtagcacctcttcccctgcttcgcccgtgacaaggaagcgccagcgcaggactccaaagaagtctgcaaaggttgcaccggcaaagcacaaggatgctgatcccgaatctggtggagaaggcccagttcccgaggatgaagaaatcgacggtgaagataccaatgacaagaagtgcaaaataaagcacgaggagactgaagagtaggtttctttaatttgtgaggatacagatggaaactctgagtactaattttgtttgatcaaggaccttcttccttgacggtatcgtcaaagaggatgaagattcctcggatctctaaacgccaccaccgcgactcttcacagcgaagccctaacgcgtcgatgtggtgaaggtgtcagcatggagatagtatctgaattttagctggggaagtttttcagaatctcacaaccggcaggaatactagcatatgcaaaagggttatgagcagatgaatttacagcgaacaatgagctcgactatacgtgtctccttgctcgtaataaaatacttttactgatcccagccattatccttttaacttcatacgacaagaacaggataaaagtagacgacaaaaaaagtcggctgtcaattcagctatgtccttcggcgcaatccaaataaatgggcaccgggcttttttttgtatttttttctttttccccccatcacctcacggtggaaacaaaccgagttgttcatcaaccttttttttttcgatttttccttcttttctgacgaccgggtcacacgcattgttggggaataataaagcaccccaaaagaaacaaggagacccaacgtcaagtaaaacgcaaattcgaatattgaccacgggggctcaagtcaccgaaatctcaagcgactgacatgaatccgccttgagaatgaccattgagctaattgagctggtcatcggagtaggcgtcctcctcgttgtactcggtccattcaggatcgacctttttgttgtcgacatcgggggatccctccttgaggttccactgaagaaggggggcgaggccctccaggccggcttcctgcttggtagtggactcatcgagagaatgctcgtgcttcgcaggcaattcttcctcttccctgacattgacttggtcttcatcggcgatggcgttctttgtgacgcgcttgcgcttgcgggaagagccagcaggagtaggtgtctcattggcctttttgcgaggggcacgcttctttggagtaaccgggctagagggtccagacaccgccgcgacattgccattacgaacgttctccctgattttgttgagacgttccttgagagcacgaggtgttggcctgtgatcctcgtcctcgacggctgatcaaatgttagattgaacatttccagtgatatagagattagttgtggctgcagaacgaaagacttacgccaggcctcggcaaccttggccacatcgacactcaagtcatgggtctcgaggattttggcaaggagctttatttgtcagtcacaattgtcattgccagatatgcatgcagcccatgaacatagaaagtcccagcagacttggaatggggaaagaatcttgaaaaagacaaggaaagactttcgcaaacaaatttgtccaagcagctgaggatgatcaaagcaaaagtcaatctgaaaggcatttgatatggtcatgcaggaaagtatgaatatccacacccctccttagacaaaagcccaggacaattcaaaagtcatagcgaagtgaaaaagaaactcacagtttggtcagcgatcgaatcccatttcactttacccatcttggcggtgtgaacagtttgcggtagatagtatggcaggataaatgtaagcttgatatgtttcaaatgcaagtcggttatgttctcgtgaatgaataagaatggttccgagttgcgttgggtagaagagaggaggaggaggaggaggaggaggaagatccgagcaaacaatttaaagggatcagattaacgcgactggtcgtagattctcggcgcttagtcgtcgaggcaaacgatacaaacgaacctacgcagacaatgtgacttcacaggtatgatttcaggtggaaatccatcttagttgtgtagatacactgcgtagtggttatccaacgttggttgcccatgatggcccaggcattaaaatccagatatacatgaatacagtatgtagcttctacagttcttcgtttgtcagtatttacaattatgtttacacaacctaggatctgaacttgggataactatacagtgcagtggtggattctagtacatgatgactaagcggcaccactgaggctaacgcagacaccttccacttctcttcttggtagtcaccccattgtgttctcctctctagtaccctactgatcccagtgacgactatgctctcatatttgtttcataggcagagctgtcggtgcccctgcttgtcccctcttcaataggtgtctaagcaggagccctaacgctagactcgattaggcaatacatacatcaaatttacatacaacgctagaggatccaccaacggcgtagatcaacctctctgcaattctaacggccctgtaggaaatcggagactaccttcattaaaatagactaacaagtgatctgtctgatttggagggaaataactatgtaggtggctattatggcgggagggaatggtttgtcctcagttcctcgtttggtccgtcccacatcgctctgatctctaaacaatattcatatacgacattatatattccagtcattcctctgggcatctttaggcctgttcattttgcgacacgtcttctcataatccgagttggggccagtggtaagtcatcttgcccagataagcctggcgacgcaagaagacggttgctgactttattcactccatgcttagatattgctgaattacgggcgttcttctcaggctcattttgctcaactgactcacggatgcggttgaatccagcagggtttcgtttacccggataaatgggctgcacattttcataagctccagaggagtcggacaaagggtcggggccagagtcgactattccatcagcgggagaggctagctggtgatgcaatcgtttggagacaagtttggtacgtctcattgtcgaaggagatcggtgacggtatttaggctgcgatacacgttggggcgatgttgatcgagtgcgaggctgagatatgagaagggattcaaggttccgactggtgtcttgggttggctctgtaacacccgggcttctttcgatttgagacaaccccagggtattcgaaccccgcgggtgcaaggaaggcttttgtgacagcgtgagttgtttcctgacgtatgaattttgttccgatagggattgatgagaaatatcttgatgattaggttcaatcaccaagtcctcaatcccgagcttgctagcatgagaagcatccagtcgctggtcaacttctggagacttctgccgccaacctgcagcccgccgcttcacagacaaccatgaatactcgcgaccggtctcctcgtgaaaccatgacgcgacatccaaccagaacttttttgctggcagctcgccattggacaccgcgggcaatttttgttcatagagtcttttcagaacgccctcttgcgcaagggtaagtttcttgccacggccggtgctggggcggtgatcgactactatatcgttgagtttggtcccacgggctgacgcaaaatctattgaggccatcgctggagccggtgccgagttgtggggtccttggtttaattgacgatcatctggtcttgttcatggggacgtcacgctgccacccggtcggatcgattgacttgaattcaaatggatagcccactggacccacagatcaaggagattaagaatgtcagtggctagattcgagccgaaggaagcgtggatgacactggaagtgggtcggaaagatcggaggccnnnnnnnnnnnnnnnnnnnnnnnnnnnnnnnnnnnnnnnnnnnnnnnnnnnnnnnnnnnnnnnnnnnnnnnnnnnnnnnnnnnnnnnnnnnnnnnnnnggcgcgccgcgtgtcgcgtcgcgtttaccccgcgttttcaatacggtcacgtgattatcccaaattgattactccgcataggtttcaattctatctagcacaatctcgagcacgtttccactcataaagagtgttgcgggggactccgactggcgatacaattggctttggacctggagatgatgataactcaacacacaatatagcagttcgagcgcttgtgtacagaatatcagcagcgtccttgatcagcttcagaccatgtgaacaagcttagcatctgtagggtcttcttcaacatggacattcagattcaatgtgaggggtatatacgtatatgccaacgatttgaacatgtgtcactcaataagcactctcaagaatacctcccaacgccaatagacaagtaaaattccacgtaatcagcattcatcaactcaagagatcaaatctgtcggaccacctaatggcaaagctgaatccattgtgcaataatatcctccatgtcatgcgcaataccccactgtgaagacaagcaccggaaaagcttttgcatagagttgagctcgtaaagcagattcctgacaacgccaccaataggaagtggaagagaggaagagctatttacattctcgacaaagcgctttgtctccgagccagatcgaggtcggatatcctcgtcacccaggttgagatccgaatgcgatagcaatgcatcttgccaaacgatgttgcgaggtaaattcacagtggcgactcctgcgagtgaaaggacaacgtatattgtcgctgctgcaaacagggagctaggcatatgcacgacatgcgcgcggccacgtggtaattgctccacgatatcttgaatggcgaccgcatggaggacggcccgccgcgcgtcttctgaattagcccatttgattagatcgaagcccgggcggacggttccacatccaccggagatgtgttggatgatgttgtaacgcgagcagacgtggcgggagaggacggtcgagttgatcattgtatctaggcagactgtgtgccaacgcaggagaatttcgagtctctctgctgcggtgaagtgaatgctcatggatattgtctcgtggacttgagctaaagctcggcggacgtcggattggctaggaactcctacggctagttcattgtcatcaaaatcggagatcaaggactggagcccttctagcaccacacgcagtgcgaaggcagagaaatggtactctagagtccggaagctccccaccggtgggaaaagggagcggaaaattgtcctaaatgaggactgatctggttcttgggggtgcatgtgggccaaccattcatcggcagtgccggcatcaaaggcttcctcgctacttgggagggtgagggggtttcccacatgacgagaggaggcaccatcgctggaagtttgatccacgagcccgtccaagacgtagtaggctaacagggtgcgttgctggatctcccgcgcagcccagattcgccactggtgttctttttctgcagcgggagcatccatcgagggcaagttgtccattgagtatggctcgctgtcgtacattccgcagtgtcttgcccataagaagcccagtggatggaatacttggctggtggttctaattgcccggttcttggatagcgccccatagatctgacccagtagtgctgtgatcatcaactgaactcccttgcaggcatcatagggtccattgtgtgtgatcagagactgccatgaagttgaaattgcggtatgtgctaggtgccatagggcttcgccttttaaaaccgagtccttggggcctaggtacaaagagccaatggcgatggcattaaggaggagagcatgcgtgcattctcggaaaacaaaagttgcacgatgcaatattgggaatgtgggaatgaagcgggcgaagaacatgtggagacactcgtcgaggaagaccgaggtgatggacatggatttgacggcggcggtaacactcgatgactagggaaataaagtgtcagtttcgatcaaatctcggtgcaatatgtcttatgatcaaagttttcaacagccctagtttgctcatccagcaaaatacaacgctcaactcaccgagctcgtgaccatctctgtgacatctcgcactgcttgatgccctccaccggacagtatcgccccaacagaagacctacggtcatcgaatgaattcggggacccaaaatccatgccattcatatcctgcacgacaggtggaaaaggcaaggtaccaagcggaatctgccaatctgtcgtatccgaggacattaagctctgaaacaagttttccgaatcaggccaaaccaacgcaaagtccaactccgagtcgacattatgcatactcgcatgatcgccggagtgggactcctccaaggaatgacttgttgctgaagttgacaccggatcaacagtggaagcactcctcgtgtcccaagaagggagagaattgaaagaggtaggctgcggcggtaagtgggcctccgaatagtcattctttgcatttatagcacgaacgtgcagcttctcatgccgagtaagagcatcttgtcgggcaaagggccttcggcactctttacagatgtatggtttagatcccgtgtctaagttttccggttagctgggcattgctttttgagctttctgtggggatcataaattattgggagccctgatgaaattggaacatacggcagcgctcatgtctctataaagacccattagttagctcgtatcacttggcggtccctccttcgtggggaagtttgagttggagccaacgttggaagtctactcaccctcaagtgttcggccttggagaatgctttttgacatactcgacaaactagtttcttgcctcctggcagtgcaggcggcgccgtcattatccccattgacgccatttttgttcgataaagagaaggggcagtaggagagtaaattgtggagaggtgattgtggggtgtggcactgcttatgcgatcacggaatttcattttgcctgcaaccccaaatagatagtcaagttgaaatatatagatactctagttacatgaatgttgatctaaaatcaagcaaatgaagaaagtcaactacctcattttgcaaaccttcgtgatttagaagaacctgtgctcccagactgagttcttatgttgtaaaataatgccatagttgagcgtccaagccttcaaacttttattacgccaatagacttattgctacgcttcgctccgcagttgtactaactattctttctcttgcttcagctagttcggtgagaaaatatcatacctaagtatcctttgtatggttaagtcatacaaaagatacctagcttctagatcttgggtctatgtttatggtgttgcttggcagggctgtcccttgtaagcgttcaagcgttcaagcggaaacatcggtcgtggcaatacgaccaaggaagcgtggctactatgttccttctccccctatttctctagactgcatcagatcggcaataatgctcagaccaagttgcatatgtgtctcgcgtcccgcggctggcaagcagcattgaaaatgccgtcgcgattggggtttccccagctgaacggtgaatctagcgaaataaattgctaaaccctaggaaaattgcgccaaggcgtcgaaatctagagcttcggtacttggctcgggatgaaaaagtcgaactgcatagtaaaaagcttcatcggctagccgtgttcaagtgccatggcgatgctatatagaagaccccatgacagcaatttctttagcggccttctaactcgccggtaccgaggctttccaatcaggaaccgtggagtgcctccgcatttctcgccattttctccccattttctcccccgaggacccgcaatggagccgaaaaccccggagaataactaccccaggcgcaggagagctccgactgggcaaacgcggtgggattagtgtcttggctatgcacactcactctgacatttctcagaagccttcagatctgtggttattagtgtttgccccggtgccctcaagtggctcaccctgagccatagtttttcctgtaatcctcttatttaatacccccactccctttgactattctcacgacaatcgacacatcgcctggtactgagaccacctttttaatcgggggaacgcgagcagaatgccgtcctttgagttgcaaccgagctcgtctcgacgagacgagctcgaggaggtgccaggcacgaaagcggacatcgatctcatcgagagcgcaggaaatggacacgcagtcacttccgtcgagtcaatggttgctcgtctgccaaaagcacaccgcgactatctgatggagcgacacgggactttggaactcgatcctattcccggaatgagtccagctgacccttacaactggcctgagtggaaggtaagtcaatattctccctgttacaaaatcttgaaacgggacaaaagcaaatgatcccgtcggacagaatactgatatgtcaacgcgcagaaaatgaccaaccttgtcctcgtggcgttccacgcctgcatgggcacatttaccgccgccggcattatccctgcctttttagatatctccacagaactcggcgtcggaatgcaagatgctagttacttgacctctttgcaaattgccatccttggaggtgcgcctctattctggaagccgctgtccaacaggtatgggcgccggccaatcttcctcctctctctcatctgcagtcttgtgtgtaatatcggatgtgccaagagcaccacatatgcctctctggctgcttgccgggccctcgtggcatttttcatctcgcctgcctccgccattggcagtgcggtcgtgatggagacaacattcaagaaagaccgtggccgttacatgggtgtttggacactgctggtcaccctgggtgtccccgttgggcctttcattttcggcttcgtcacctatcgcgttggttatcactggatcttctggatcctcgcaattgtaagttcacattcccacggtagtcaatactctattcatgggctgatacatctaaagatcaacggctgccagttcatcttgtatctgttccttggccctgaaactcgttatctgggcggcggcatcgacagcaaggagtcaacgatgaagatcgagtacatgtcactgcgacggatcgaccccacaccattctcatggttcgagttcatccgtccactgaccatggcccgacacccatcaatccttatcccagcgtgcgcatacgcaatggttttcctcttcggcaacattcttgcaaccgtcgagattccccaactcctgcaagagaagttcgaactcaacgccgaacagcttggcatgcagttcctaggcgcaattataggatccgtaatcggcgagcaaatgggcggcgtgctgtcagacttctggatgagccggcgcagccgacgcatcaaccgcaaggccgagccggaattccgtctgtggctcagctacttcggtttcgcgctcaccataatcggcatcatcgtcttcctggtctgcacgcaggagtcacccagcggacactggaacgtaacgcccattattggcaccgctattggtgctgtcgggaaccagctggtcaccacagtaatgatcacctatgctatcgattgcttcccacaggaagctggtaatattggtgtgttcatcacgtttgtccggcagatttggggcttccttggtcctttctggtatgttttctttctctctgcgtttattttgcaagttcgtcgctaacctcagctcaggtttgctcccatgttcgagactgtcggtatcgctcccagcgcgggaattggatctgcgctggttgtctgtgtcagtgtcattcccaccatcttcttgcaatggcggggtaagggttggcgtagcgaggagtaaaggcactgggatggaaattgacttcggtttcggtatttgacgttcacaattttcgatattattgtctcgggttgggttttgtagagtgtatcagtgggtatgatatagagtgatagagtgatcgggttcgggttcgggttagatgagtcggcatcgaacacggcaacgtggttctagattgcatataggtagctaggccaatgaatgattgtatgattcttcaaagagctttggcaatgggcgagagaaaatacacttggttagtacataacagcagcatcaaaaagacaagttgagttctgctcaagaaatcacatcgccatctgtagggatctgtagggatgtgtatagaggcataaaaattcgatatcacctggaacagcaacactcctataaagaaaggagtaaaaattaaagagaaggattttaagtcaacaatagagatctagcaaaaactcctttgagaaaaatgagccggagactatctcttaaggaccactccgggcgggaacagctcgggacaccgacccgatataattccgtagcgcgggtcaacgaggcccacgggcggccctggcagacaattgacaactgccgggtgaagagtttcttgcagccctgcttaaatgttaccagcatgcaccataaatgaaggagtgagatgttattcctatacagttctactatggggtttatgctatacaatcaaacatactagtatgatagttacatttgatcagtaaaaggccaagcatcaaatccaaggttttgcctttttctagacactttagcgagcttttgtctacaacacagttgtccgaagttatacagggcgatgtgtgggagagacttactccgggtaaggaaaaattcatttccggttgggttctgtgattggtcaaagcttcgcgatatagctgttgactcgcgtttttgcagaatcccttaccttgtggtttggagccaggatttgaatatatctatgttgtagttcgttggattggatggtcattattagtggccgcctttattgcgccgtatatagggaactttggatggttgtgcaggcaatcatcccgcatagagtttacgtgactacagcatgtatatgatttcacagttgccagagctgctcaaagtcattgactatatacaattggaaagtattgtttcagaaagtcaaatctatcgttttatattctggaatcatcattgatgctcaatcttattgataagtgttccaacgtgaggcagcaactcaacggcaaactcgtcgccagccttgaaaaattccttcggattcctagctgctccgacaccgggcggagtgccggtcaatatgattgtaccggcaggcagggtggtgccttgggagaggaagctgattagttgagggacgctgaagatgaggtcactgcgatgaaattcaatgttagttgatgttactttgtatactagaagcaatgggaagcaaatataacgtacgtcaaggggcagttctgcattatgttgccgttcttgagaccgcgaatctgaagcttgctggcatcagggacgagagcagcggaaacgaggacggggcctatatataccaagtcagtgtaaaattctcctggatattatacagtccatgaacaaaccaatcgggcatgcgccatcaaagccctttgaaaaagaccactggctctgactcatctgagaggtgcgactagaaacatcgttcgcagctgtgtagccaagaacgtagtcgagggcctcagactcgggcacatccttagcgtcacggccaatgacaataaccatctcagactcgtagtcgcctgtgttatcttgctgtgtaatcttgggcagaactgttggtgcaggccaagggtcagccagagagctggccggcttcatgaacaatgtcgggacttcggggattgggagacccatctccctggcgtgggaagcatactatagtgcgcattagtaacttcatttctcttgaatgttcctttcatgattaaaacccacgttcaagccgatacagcgaatagttccaacctcgctttgcgccaagggggacagaatccgcgcgatggtctccgtcgcatcagtcacctggccagggctcaggactgaagtaccggagaacgggcgcaccgaaacctcctttccctggtagagagccaatccaacatccaacttaggatcgacgggctctccgattagaaccttggtggggtttgacttagggacaaagcgcaccaagcctatttgccgtcagtctggatatccgggtcaatttgagagatttcttacgcgaaaacgtagatgcgattttggacatgattgtattatttggagaatcaaaagaggatacaagtgaattgaagcagaaaccccatatataataagagctgtcgcgaccgatagcggagtatgtctaccccggcactgtataagccggaggggcagcttcccacaatgtggggaagtggcgagcgcggccgatttcagcttggagaataaaaagaacaaaatccccgcgatggtcatggttgtgtagtcattattcctatccgtatcccaccgtcatgtctgctcctaaaggtcccttccacctggttagtgtcaacaccgctcctgagcgcgccagacgcctcatcggccgcgtcgccgaggctctgagcgatcggtacactatcatccacgtcgacaactgcgagagtaagcatattgagcgtcattattgagtgtgaatctcggttgacagagtctcgcgcaggaatcgacgaggtcgaggccaaggtcaagcagcacaacccggaggttctggtaagtccgaacttcgggatttccgaacattcccaagctagaatttcaaattaacgccctgaacagttcagtgcctctatgtggaccgctgaggaggctgcgcagatccaccaaattgctcggtctgttcgacccgatatcaagctgcatgccattcccgagggcttgcaggtcgagcgtggccctgatgccattgttgaatatctgcttgagaaggtgccggtgctgctggacagctaaacattgtaaatatatatgaccatgatatatccgtgtctcaataaacgttcgatgactagtatttattacgttgctctcagttaagtccacggtatggaaactttgccttccttgtgatatctccgcaggcaccatagtatgttcttccgagccgcaaagtaaccgcattaaacgcattttatgctgatgaaacagagaggacagaaagccatacaaggcttaaccttcgttttgtagattattggaactttcgatagcctggcaaatccgacttcagaaatgagtcagtcgacgagaaaataagggtcccatgactacactaactctgagtgactttaactacatgcgaaccaccgacaagcaacctctcggtgtttaaatatttcgggaaattgaaccagcaagaatatgcacagcctgatacagcattctatagtggcatctcgtacggcgcccttgaccacccttggcaatgccacacaccgagatatatctgtgcaatgatccagagctgagtggttcctgcccatcgattggctccagtctaccaaaaattcggaaaccagaagcaaccgtctctcgctgagatttgtggatccatcgagcgaaactggacgagtaatccacggaccacagcccccaagccctcaatacggcacctgctcaatacgacaattctgctcaaaaatggtccctcaatgacttcctatccaatagttattcggtgaacacgagctccatcccgctccaaccccttggcaccttggcattcagggtcagccaggtataactcccgggttatcacttcactaggcacaaaacgaatcattttcacggtcaaagcccgtgcttataagctcatgctcgaccggggcattttctagttctctgttttcttctttttgatgaaaatctagaatgatgagctgacagacgattctatctcaatattctataagctgattcacgagttcgagagcaatgttacttcgtcgccattttctcacaatcctggccttactagccgtcccaacgcgggtattatcacgaaagggcggtgatggctctagcagtgatggcgatagtggtagctccagcggctccagcggctccagtgatagcgatgacacctcttcgtcaacaccatcctcaggcggactcaactgctttgatacccaccgccttgactttgacgatcttcaaccttcgcactacgaccgatacaatcgggaaccacgccgtggtcatgctagtgcttacagcgattgggatggcgtcttcttcaaaggctcagccagtttcaaatacacaatccaaacaccacctaacaatttgacagaaggcgacatcgttagttcatctttcatcacatgtccccttggcacacaatccatgcgcatgctaggcgctgcatgggtcgctgccaaagctcccactcccgctggacctctcaatcccatcacgttggggttcaaggcctggaagagcaacgtgcgcgtctcagatatcgattattcatacagtgtctgcgaagacttggatctcatgcgcctcactacgacggtggactggtacaatgaaacttcagtcgagaaggccatggatgcagttgcgttaaacgtaacacaggcggctgataacaaaaacaagatcctgttcgacggggtctatgatcttaaggactgggcagatagtgaaaggagctccatggaaccagcacgctatgacaacgccggtctttcggatcagatgatttcccttccggatagtctatgctccgagtacagcaatttgggtaaaatcctcattggatggcccactgggacacacatcaatgggtctatgaccaatgaaactcttgagttgggtttttctggctcgacaattgctgggttttcacatcggtatccatggccggacaccgacacgaaagtaaatgtgactttcgaatttacatttgcgggtagttatgatgctgcgaattcatctcaggtggttctccccggggcgtcgagccacaatgcgtcactaatcacctttgagagggcgactggtagtgccactgccacaagtctctcattgtactccgtactactgtctttattggtcagtgttggggtgatatttgtgtgagcatacaactctgggaggaaatatatcaagttatcgccaatatcaattgatattttcccttctacttccttttcgttgtcatgaagaaactcaataacaagaaaattcatttttaagtaatcctccacctttgctagcatctcaatagcccggcatcactaggacacatacctaaatattaaaccgaataagtcgcaaatggcagtaattcgtcactccatacttagtaaccatttttgtctgggacgattccatagcaaggaccattcttgctaaacatggcccgcaagtcatggacaataaattcaggaacctcccaggcagcaaagtgacctccacgaggatgctcgttctgttgaacaaccggacctaggccagtggcccaagagcaagggatgacagaaatttcacgaggaagatgtgcaattgccagcttcactcgcgggacgtatgcaatcaagtccttgtaggatgttcccttgaccacctcggcgtgaaaagcttcatagtatatgcggacactagcggcgggtccggccgtagaaaaccaatagatagatatccatgttagaatctcgtcgtcggtccaggcatatgagtctgtccagtcgtgcagcttctcgtaaatccaggctaacaaggcaacagggctgtctgctagtgctgtgccaatggtctgtggcttggtgctttggagttggttgtaaccgaagccttctcgattaaaccactcagtcctttcgcgacctgccttttctcggccattgtacggcagcaatgcgtgttgcagggctgtccatgggttattgatgaatttagggggcttagccagcaccatgtttatatgagaggctcggcaatgctcggggtatagtagaccgatggttctagtaatccagaatccccaatctcctccctgggtcactgtgcatagtggagttagttcagggctacattttagttcttttcgagccataccatactgatcatagcccagcttgatcatgagcttgtgtaagacttcggcatattgtgcaaggccaaagccacgttgagtcactcctgaagagaagccgaaattaggcagcgatggagccacaacgtggaatgcaggactgtggtcgtcgcctttcagcatcggtagtagtttcgtgacttcaatgaacgatcccggccctatttagaaattagacaccgcacgctataggaaatttatggattcgattaatgagaataccgatactcacatccatggctaaagagcagtggaatcgcgttctttttggtgtttatttggtggacatctacatgttgaaccgcgtgaatctcggacactgaggaatccgtattgcgtaaaactcacagtggatatccaaactgccaaacccatctacctcgatcgacgttcgatattggggcagttcattcaacttggcttctgccttccgccagtcaaagccatccttccaatactctatgagtcgctgcacttctttcacgggagttccaaaatcccaaggatcttgttcagcggactccagctgagttgcgaatttggtaagtgataggcgttgctggaggtcttggagattctcatcaggaatgaaaatattgtacagtctcggttgttcggccataacggattagtttggtttaattagatgataactagaagctatctggtgaggcagtgttgcgggggagactttgcgcttgagatgaagtcagtctctccgaggcccgggggcttcaccgccgggtatcccagaggccacaacgcctaacctagcggagtacggagtaccgggacaatgtttactcactagtgctctgttgctgttcgatattatgctacgtcacggtcttgaacccttaaatcaaatcatctaccatttattgaccacattaccctaataaactgacctatgaacaaccttagaaatcgtaagaaattttgcaataaataaatgtcctgagttaggagggtggacggccttggggggttggggggatgggggggnnnnnnnnnnnnnnnnnnnnnnnnnnnnnnnnnnnnnnnnnnnnnnnnnnnnnnnnnnnnnnnnnnnnnnnnnnnnnnnnnnnnnnnnnnnnnnnnnnnnnnnnnnnnnnnnnnnnnnnnnnnnnnnnnnnnnnnnnnnnnnnnnnnnnnnnnnnnnnnnnnnnnnnnnnnnnnnnnnnnnnnnnnnnnnnnnnnnnnnnnnnnnnnnnnnnnnnnnnnnnnnnnnnnnnnnnnnnnnnnnnnnnnnnnnnnnnnnnnnnnnnnnnnnnnnnnnnnnnnnnnnnnnnnnnnnnnnnnnnnnnnnnnnnnnnnnnnnnnnnnnnnnccggggccttccaacgttggggcccccgaggccatgaaagtagattagtcagcaagaagctggcccgcaggcccgggcggtatttccaaggtttccaatcattgatcgcttgatacttgccattctctcaacctgaaatcggaacatgttctctctccggactgttgcacgcggtgctccaggtatccgggctttctccacagcccggatactgcagaccaagctggcatatcaggtctttggtccggaaaaaggcgaagctgtccgggaccctatcctgtttctacacggtttatttgggtcaaaacagaacaaccggagtattagcaagtatgtttcgggaccagatatataatcaaacttccttttcttacatatcttttaggattttggcacgggatctgaaatgccagatcttcgcactggtgagtttccgctcgtccccggaaagacatgaacaaaacgtcattttagaatcctaaacaaatctgtacaggatctacgtaaccatggccattctttccatgcccacgagcagaattacggcgtcatggcggaggatgtacaggaattcatcaaacagcacaaactggacaaatgtgtcctgatcgggcattccatgtatgtgatcatactccatgtcagccgtagctcaagtgctcttcacatactaacaattggcaaaggggtgccaaagtggcaatggcggtagcattgcgcgcccccgaatacgtgtcagctttaatccccgttgacaacgcaccggtgaatgcagcactgcagagcgatttccacaaatatatccgcggcatgcagaaaatcgaagatgagaaggtgtcaacgcaatccgatgctaacaaaattctcgagcattatgagaaggtaaggggtggtcatcttttcaactagaggagaaggcgtggcaatgagcctggtacccttcggtaatttttagcatgctaacactacccagtctcttccaattcgccaattccttctcaccaacttgatacgctctgaagataacacactgaagtcccgagtgccgctatccatcatcggcggtgcattaaataatatggctgattttcctttcaaggaatccgataacctccattattatggcccgacgctctttgttcgtggcactaggtctaagtatgtttcggacgacaccgtgccggctatcaaaaagtttttccccaacgcgcagattgtggacgtcgaagcgggtcactggctcatttctgagaaaccggaagaatttcgccaaggtaattccctattgtcaataattaataatagtttatggcttacacgatgataatagcggtcgtgaagtttttgaagtcgatataattgggacggcattattggggtgggatatcggtcacgtgacttagaatttagacgcatatgtactagagaactccattgtacagtaataattcactcattggtgtgctgagtaatatcgatttgaatagaagatcgcccggctttgagcctatcgaccgtgtggcgaagacgtatctaataatgcttcctcttaaagctggattgcatagatatcgatggttcacgtgggaagtcgtaattcgagagtgacggagggggaagaacgagcccacggcgatagttgtgagaacataatatctaggagatcaggtttggacctgctcattcatcctgcttattccgctttcgcttcttgcctggtctgcttgaagaataaaacagatcttctgcctgctccgccctcttctttgccctcttcttgtcttttctgttggagcccgaagcaaaatatgacggaccagaagagctaggagccggcgaatagtcaattaccgaagagcattcggttgtgtttctttcgtcatcggagtctattacagaggagacccgtcgcttccctttcaaatgttgaacctgacggggttcggcggatttgccagaatacggcgacggatgaccggagctgggtccactgggcgtttgtgagcgctgtcgagcctgcatcgcagtgtgatttgacttcgaaccgcttggtgggcaattttcggccggacccttcccgttgacctgcactggctgatatgaacctagagcagggcccatggggactgtcttgggggttgtggtaagtcttggaataaaagcacggccgtttggttgtgattgaggagtttcctgtccatcaatgcgctcctccattggtctatcaagaatatcggaaatctttgctccccctgcaagcgccttgaaagtatcttcagctttcctcagacgtttgatgtacatcttcacctcatccccctgctcagtgaatttctccaaagataccggaggctcccgctcttcaagggctttcaccttttcccggagtttgccgaaatcgttctcttcggttgcgttatgaccttccaactctttgagctttgtcctgagtaccccaagatccgctttctccgctgtgctccgggcttccaagtctttcatctgtttccgaagttcgttgagaacttcatcttcggttttgttccgaccttccaggctttctagcctcatcgagatattgccaagaccattttgcgtggtagcgtctctctcctcggcggcttttcttaactcggcgatcgctttttggacggattcgagtgccgagaaatgagcatcaatcttaccgatgaatggatcgatctttcttatggactgattgatgttgtcaaattgtgcagactgctcagaggccgtttgatccatgcctccgatggtgtcgtcttgggcggagatcctgttggataaatcactccattgatgaagatttctctgaaactcatcactgtgctccttgattgctttctcaatcggttcaatcttgtcggaaaggcctttaacctcttggagcaaagtcggcaaccgagtcaaggtctggagctgctcggatgacacatgtgctgcttgagaccttgctgcgcagacctgggcattttctgtatctgccttgaatcgattcgtatctgccttgaacgtctctgtatctctctggagcgcagaaattctgccgtcaatttcagtctggtaggccgtcaattgatgactgagtttatcaacagaggggtacatttgctgcatggcatgtgccatagaattgactaagtcgccagtagtaatgttggaccaccgtgtttctaatgaccgaatgcccctagagagagattcaattttactttcgcactttgttacagcccgaggaaggtcggagactggagtaaggcgggtttcaaatgcatctagtccgtttttgaggtcgttttggaggcgctgcaagctctcaggcaaactcgtcctaagttggtgaaggcccacggcgaatattttttgattggtgttcatttccttggagtttgcggtcaggtcctgcacctttctcaaaatttcatgctgtttggtttccagtgatttctggctcgactcttggtttctgcgtaaagcgctcaactcatccagacgggcgacatccacctcatgatggaggtccttaatcttgttgagaaaagttgtgtactcctgtactcttctttccagggacaccattcttgtaagcaccccgctgtggggagttggtgttgcttctgacgagggcccaccgccgttatcgatgttctgttgctgggttctaagtgaggccaggtgatcttcttgagcggttatttgcgccgtggtctcctgcctttgggtttccaggtcagtttcaatttgtgagatttgagtcgacgcgctattgttgagatcatgtcgtttattattgagcgacctgagattgctttcaatgtcacgaagcttgccctcagcgtgttcattcgcagtttttaatttgccgccaagatccgagatattggtctccagcttctggttggaatttctcaattcttcctcgacggtgtcaaccatcttctcgacggtggagatcttgtcatcaaacttcttgtcggcagccttcacttcatcctcaagttctgagattttattcgtgaattgaccattgcgtttcatttgatgggagactgagttcgcaatcctattcatgtatcccattacctcgtccaatccattcgggttctctagggaatgctgcactttgtccaggtttcttttgagttcatcgatatcttggccctggcttcgcatgtgcgtctggactctgtcgaattcggcatttcctttcattggattatcgccgctgctggttgggcctaggccttccctcatttccttgattgtggactccagattcccgaccctttcaggtatcttttcaagctgggattgaggcttgtactgcgacaacgtcgaattgaaattatcctgcgcctgattggagagtaatcgatgctgcatgatcgatttgacgtggatgtccaattcatttttggccgcgtccagctgctgctggaagagagcgatgacgctcggaaattgttgagattgttttgccctctgtaggtttttggtgatagaaactatctcattttggagtttctctttctcttcctcgcacttgttcactttgatcaatgagttgaccaaatcagagatgaacaatgcaccttgacgaatgggcgcacttgggctttctattgacgtaggtcccgcggcgctgttaggaatcgagagtggagacacctgtgggagcgatttcgcaggggatttctggatgagggcgggtgttgcggggaggtttaggtgtgcctgttgagcagttgacgattgggaatcaactgattgcctaacagcaccggcaagccgaggatcttgcgccttggtcggggatgacccaggcagaagtaggcccgagagtcgcttgcggggattgaggttcggagagtcaacatccattctgctggccatattccctgcaatgaatgtattgcaaaatactcatcgtattcgcaggagaactaaagtatagtgtttcggcggtcgacttgtgagacgaagtctacacggcagtcctaaaatggaacgcttaaggtgcaatattaacgcgtccactgtatgaagacttggatgtgaggtattgttaaaaacgcccagtatattcctcctgaggtagtcaagggaactagatatgtctcatagaacgtgttataagcaccaaatttgtagaattcaagccatgccaataaaacaaagcagaaatgaggtcaagcgggttcaccattcctttcaggaattattctgccgggcggtgacaatataattcggtctgcgatctgccctctcttcttttgctttgctagagctttggcgcatttaccaacataatcttccagtttagaataaatttcactctggaaatcttcaaatatggctgtggtgagttacaattcttctgtaataacctcacggttgctgacaccaaaacagccaatctcgactgtcgcagagagcaaggagctccggggactgaacctcatcgccgcccattcgcatatcagaggccttggtgtcgatgcagacactcttcaacctcgggcatcatcccaaggccttgtgggtcaggaaaaggcccggaaggctgctgcggtgattctgcagatggtgagggaaggcaagattgccggtcgcgctgttctgatcgcaggacctcctagcaccggaaagacagcaattgcaatgggcatggcacaatctctcgggccggacgtacctttcaccatgcttgctgcttctgaaatcttctcaatggagatgtcgaagacagaagccctgacccaggcattccggaggtccatcggtgtgcgcattaaggaagagagcgaaatcattgaaggtgaagttgtggagattcaaattgaccggagtgttactggcgtgagtggattctctatgcaaacgagttcataacattggatactgactacctacagggcaataaacaaggaaagctcacgatcaagactacggacatggaaacgatttacgacatgggaaccaagatgattgattctatgacaaaggaacgagtaatggcaggagatgtaatctcgatcgacaagtcctcaggcaagatcaccaagctcggtcgctcatacgcacgctctcgagactacgacgccatgggcgccgataccaagtttgtccaatgccccgaaggcgaactccaggttcgcaaggagatcgtccacaccgtcagcctccacgagatcgacgtcattaactcgcgttcacaaggcttcctggctctcttctccggcgatacgggcgagattcggagtgaagttcgggaccagatcaataccaaggtggctgaatggaaggaagagggtaaggcagagattattcctggtgttctgttcattgacgaggttcacatgcttgatatcgagtgttactcctacatcaatcgtgcccttgaggctgagttggcccctatcgtcatcatggctagcaatcgcggccaggcacgcatccgcggaaccacctatacctctcctcacggtctaccccttgacttcctcgatcgggttgttatcgtcagcacacatatgtactctggtgacgagatccgtcaaatcctcgccatccgagcgcaggaagaagagattgatctttcgcctgatgctctcgcccttctcaccaagattggtcaggagtcaaatctgcgttatgccagcaacattattactacttcgcatctcttgagtcaaaaacgcaaggcgaaggaggtcagtgttgatgacgtccaacgcagcttccggttgttctacgaccctgctcggagtgtgaagttcgtcaatcaatatgagcagcgcttcatcggtgaccaaggtaccgttagcttcactgctgctaccaatggcgacgccatggagctttcttaattgggttacgtgttttagtactgggctattcggtgggcagttaagcgggtcgaaaaaactacactggatcttgatttttatttcgttgtcgcatcaaacgatgtatgataggactggcgcttgctgtgtttatttggcctttgagattcaattgcagtcctctgttctgggggatctgatattaatatttcattcataaatggtattttgtgtatccaaggcaatgtcgtagctgatatggggggattatattacaagaaactgacagtgccgctccactgccctacatctccaacttgacggaactcaacaccttcgccaaagtagcccgcattcttccatgagtccatcatcgcgctatcgtacggcccatgggcatcccctccatctcgagcatcagaccatcgatattcccacatggccggaccttgctcagtcattccttccgcaggagggtcgatccagtcctcacccgtgtcgttgcggtactgccgtgtgagcatttcgcgctctgtgtcatagatatctatttgaccgcggcccattaagatatcggcggcgccagtgatagaatcaattgctttcttccgagccagctcattggggttctcatccgtcatctcgacatcctcgacggcgttcttcttcttattctttttgttttgccacttgggctttcggtgaagccctttgcccagtcgggccagtgcctcgagtgtcgtttcgccgcgttcgaggtgagtgatgatcgtcttcagggcatccgctgtcaaaacgctgtcgtccattctgtctttctctttgcgctctgcatcgcgttgctcggcagcttctttggctttcttgatgtccttcttagaaacaccctccagccacgagtcgtaggccgcatcggggtctactgctttgcggacgtagttgccttggtcgtcaaatcggccctcctcttgttctgttcgcatgttgaaggcatctaggagaggtgcgtgttttttcttcccacccgcaccaagttcctcgtccaccacttcgtcaattcgtgcgcgttcctcttccccgacttcactatcactcccatcttcctcctcatcaatttcggctgcacccttgctcagatcgacatgaagtgctcctccaccttttgaagaagcgacttggccctcgatctcgtcgtctcgtaggaaacgaacggattttttcttgtttatgatctcgtcgccgtcgacttcctcttcgccgaagtcctcttgtagctcggcgaacatatcatcatcttccgcatcttccttggcttgtttgcgtatgggtttctcttctctgcgcgcagaaaacccctcgttctcgctgtcggaatcataaccctcgagattgaccgccttgcgtcttattctttggccacgtctgccaatctcatcagcgtccagtactgcgtcttcttcgggcgcatcagctgcaagagctgagggattgcgaaggtcgaagcggggcttcttgtgctctgaggaatcctcgccgtcgtcattgtagtgggtattggcgaaatcttcgcctgcgcgcttggggcgtggcaatgaactggacatggcgcttttggggcgatttcggttgaaaacaaacgagaaagatagcaaattggaagggtaaatcacctctaagagagctgatttccttgtccggggtcggaccggaaaatcatggcggagcgagctgcgtcaccgatggcgatccaaagagcggcatattgtacctcaaatcaacccgtctcacacttttctctttgtccatcttcagtctttaaaaccacattaatttgacatggtgagtcaactcagactcccccgatcttcaccttactaactaacagctttagtaccgacctggttactggtcggatgaccccatggatggaatcctaggtgccggtatggcgcgcccgggcgccacgtcccgtcgcttcgatgaatactatcgctgctacccagtggcgatgcttcctggtcctgaaagagagaatgtgaaccacggtggcaaggtcatcatgcctcccagcgcattggacaagcttacccgacttcacattacttatccgatgttattcgagcttcataatggtgcgaaagagaggatgacgcatgcaggtgtccttgagtttattgctgaagagggaaaaatatatttgccattctgggtgagtaagacagactcgtcaacgtgttgtaactgtactaagactcggttcgctacagctgatgcaaacattactactggaacctggcgatcttcttcaaatcaaatcgacagacctccctcctggccagttcatcaaactccaagcacagtcgacctccttcctcgatattagtgacccgaaagctgtgctagaaaacgcctttcggaatttctcatgcctttccaaaggcgacgtcttcactttttcatacaatgatcaagtatatgagatggcagtgctggagacaaaaccttctgggactaagaatgctgtgtccgttctagagaccgacttggaggttgatttcgccgctccggttggattcgaagaaccacagcgaactagcgggaccagcacacccggtagcgtcattagcggtgggaagcttccagctggtggacttttacacccccatggcaccatggcacaatcaatcaactactccgccattgcccccgaggccacctctgctgccacaggtgcccgtgcggcatcatccaactttttgtctggaggacagcgcctgaacgctaaaaagggcagcaaggctccgacccctaacccttctactcctactccaggtgcttcaagttcctcacatccgcttccaacccgaagaatcaacggcccgcaaccacttcgactcccgcccaatcaactcttcttcgggtatgcaatcaaacccgtcaaaccccgtgatgagaatggtttggttgtcccagatgaccagcctaagttccaaggaattggaaaaactttgcgtgggaagcgaaaggatctgtccgactctgccaccccctcggggagtgaaactgagggccaaaagagcaaggaaaacactaaaaagtccgacggtgggggtcgaactttgggaaagcactaatgtctgcaacaacctatttaaacctacactttcacgattcccctgggcttttagatagtggaagtctctagattccgcagcgagatttccttcaagggcatagcaaggttcaacatggcgttgggggagtttttttaccttcacttgaatacacaaaaggccttgcaataaaccccactattttcatatttctcgtaggcagtccccttctccgctttctggtctttgttttacaatcagtggtattcatatgtagcggatatcgaggactcttacaacactcaagggttgggatgcttcggaacgatcaagcatgcctcctatatatctctgcatgtgaattgaactgcaggtaagttatggtcctggtcagaaacggcacgtttagttcggctagcgcgcatagctcttggcaagccgaggatcgccgtgcacaggcctgaaactggaccacactattgatctcacaccagatattgggggttgcatcatggccacaatacctgaaaccaatttgggggcattcatcagactagccccgtcagtctatctccaagacccgcccaacccgagcgagaaggcagataggccagtgatattcattgctttttggatgaatgcacccccgcgcgctttagcaaagtatgtggtcgagtacagagggctagtaccatcagcgcgaattatcttcgtcagaagctcatcaagtgacttcatctggcgtctaagggcccagacccggagagcccgcgtcaccccagccgtggaagcaatgcgcggtctagtgacacctgagaatccagtatttgtgcacttgttctcaaatgggggcatgtcgagcacaacacacctattgcaagcctggaagaatgcgacagggaccccattgcccatatcggcaatgatccttgatagcgcaccgggcagtccgagcctacgagcaggactcaaggctttctcctttgcgcttccgcagatgtggatcttgcgactgcttggcaaaggctttatttttgctttcttggttctcttcaagttgatccattcgttttctatgtttccggatcctatatcccttgcccgggagctcatcaatgatacctctttggtacgagcggctaactcggacggaactctcagtcgttgctatatatactcagatacggatgatttagtgaactggcgcgatgtggaatcccatgcggtaaatgccgaggctgagggttgggtggtgcgccgtgaagtgttcaagaactcccctcatgttggacatatgagaactgagcctgatcggtattggggcattgttcgagagtacttgggagctttggtgtcggtgtgatgagcattcctttgcctttcggttttgctttggcttaaggaagactggaacgttacatgatagacacggtactgtgcgacaaatatacacatctgcttgcctccatgcataactgttttttttttctccttcaccaagtcttctgccaatgaatatatatccagggatttccttccaaacctttgaatgtcaattgacttctgatttaaccatgcagcaaagtttcgcaattccatggtcattggggttaaatcactatgactgatatctaaacatcatccaggcagatttgttagagccaacgtgctgaaaggcccggagccaatttccgcaacttccgtctcaaggacaccaaccattgcaatataccccagaatcaaagacgacgacagccatgcatcattatttcggccctcgttccactgctcccggcttgatctgttcaagtattttcccatctcaatcatcttatttcacttatcttggtgcttgtctgatattgtgcaggccatttcacaatagacctcgttaaactgggttttggtttccttcgttggccctgtcttactctgaccgagcaaaataggtcatctcattatcatatcaatcttggagacttttatttggtatattattattgactaaacgccacgatgttccaacaccaatcccaccagccgagctacctcaacaccatggcggagaaagacacccgtttcgctcttccgggattcaacaggccgctagactttgctccgacggagaaaaacatctatggtatcgagagtcggagtatgtttccatctgcgctggatgatagagatatccaagcaggatacgtggagtaagtgtagaatccccaagacccgagaggggctcaatgctgaaacccatcatcatagcctacccgtcttgaccctccgcgagatgcatatggtagagttcatggagcaactgaccgatattcatgagtggtggaaaaaggttagtcgttctcaatacaaccgatactgatgatttcgctgaaatggttttagatctttgatcccgccacacaagaggagtggaagaaggcggccttaaacagtggcaaagaccttacgctcaacatggttgaatggattattgacgagcttcaattcaaagccatgatctacgagaccacagatgtagtcgccctttacaacggcgatgtcaccaagtccgacacaaatctgcctgattcactctatagtgaaatgcaatcccagttcgaggtcctagagtacgatttggaagaaatgaagtactaccatccaggacatctaagccaacagcgtgacctcatttccatggcattgtatccgctcatttacggcagctcccgtattcttaccgacagggttattggggtcgaggactgcctcaagtttgccggcaagggtgaagtgatcccaatcccaaaagataccggaataactagagaagacattgcctggcgcgtcttggcccgggcagacatcaaggttcggccctacagccggaaataccagcttctcccttcagactggtcactcggtgatgatggacaatggcacatagccacatacatcaacaatctgcatccaatcaaacaccggggtctctacaatctcttcgagcggattttcaattgtctcgttccgcagtggaacgcaactttgactcccctcaaggacatgctccattcccgtgcccgaatggagtaccacaaggcggaatattacccagtcccagcggaaatagctgcccaggcacctacgattcaaccaaaagaggcgcagagtgagtttgacgagcgcatggagaagtggagaatgcagaactgccgtgccatccaacccgacgcaggcaagttcattccctgggcagtcccaccctggttgatggacaaattgcccgaggacctgcccagtcccgttcggattgaacgcggtgtcgatatcaaccgggactacaaggaccatggactgcaggtgatcacacgtgtgttgggcattgatctaactccggagaatccgactttcaagacagactggcacgtcgagggctcgatggtgagttcaaaagcttcgataaccaaacagtgcttgataataacacaacgataaaccagaacgagcacatctgcgccgcagcattcgtaccatacgagcacgacaacataaaggacccgtccatgcaattccgcaacatggcagagtccgacacgctcacagaaatcgagcacgagccaaacgactttatctggctgaaacaagtctacggtttggaaaacggcgagccggccatccaatacccaggctcgatctgcgccaacgtaggtcgagtggtcatgtacccgagcaatgtagaacacagattcacaaacttcgaattgaaggacaagactaagcctggacggacgcgcgccgtggtgtttttccttgtcgatcctaatatgcgtatcatctccacggccaatatcccgccgcagcgtgtggattggactaaggaatttccggctggggcagatgtcaaggaaggtttgaaagatctggcgcttgataatagaaaaaacaagggagatatgcctatgaatctggacgaggctttggaaacgagagtcaacgtgttggacgagctcgagcagtttactcgctatcagcatgtggcttttgagtcaaatgttctgatgctctaatgttttattttcttcttttcctctggtttttttttctttttataataaaatttgattttttcgagggccactgccgagttgtttctgtcgctcgaaggtgatgtggtagctgcagctacgtgctactcaaaagaataattaggtaaagatgatattaaatcgccgcgctatgccattcattcgtaagaccaagtatgcacatgtcccattttgattatcccaaactccaatcaacccaaagctatatccagagctcaacgtcccttcatctcagggaactcatcatcaagcttcaaacgagccgtaacgttcatactcataagttcttggatgagaagtttggcagcatatgggatgaccatcttcacaacggaacgagacgacttgcacccaggacaccagttcaagtagcccatgaaaccacacttttcacagacatccacctcgtggcgatcggacgagatcatgaggcgctccagcagcagctgactagtaccgtacgcaatcaaacaatcacgttccatctcaccgagacgcaaacctccattacgcgaacgaccctcggtaggctgacgagtgagagtagcagtggggcctttggcacgtgcgtgcatcttgtcttgaaccatgtgcttcagtttctggtaatagatgggaccggtgaagacgtagaaaggcagagcctcaccggtgataccggaagtgaggtagtccttgccaccatagctgaagcctttgtcgatcagaatttgggacatttcttcgacgggactgccgccgaaacaggtaccgtagccgtgttggccggacaaaacacctgctttaccggcgacaagctccagcatctttccgactgtcattcgagaggggaaaccgtgagggttcatgataatgtcagggttgatgccttggtccgaaaatggcatgtccgcctggtctgcaataattccaacaacacccttctgtccgtggcgggaagagaacttgtcgccgacctcagggcgacgggtttgtcgggtcaggaccttgatgagttgcgtctcgccttcagtggcagataacatgaccttgtctatgtaggaaggatctggcagcttgtagttcatgggtgcctcgataacatctccgccgccaatgtcggagccggggaatcccaacgaattttgtaccctaggcgtgaccttatttatatagctttcgccgttattgaccatttcgccaactgcagccagaccatcagactcgagaagcgcgtgcttgcggattggaacaccattctcgtatgtcggtcctttgagggaatccttggctccgttggggtaactcttcagcgtcgtgacgtacttgcggaaaacctggcaacgtccaaagccacggtccactgatcccttgttcaagaccagagcatcctcaatatcgtagccagaataactcatcacggcaacagtcgcattctgccccgcaggtagttggtcgtattttgtcagctcaatggttcgtgatttaaccatgggcttttgtgggtagaccatgaggtaaagaatggaatcaattcgctggaattgattggaagcaatagcgccaatggcttgcttacccatggcacattggtaggtattacgtggggactggttgtggtgaggataagggatcaagccggcaacagctccaaggactgtgaagggttcaatctcaagatgggtgtgagtatttgagatgtccttctcgtagatggcgatgtaggagtcgttctcctcgttcacgtcgaggtattcaacgagcccttgcgcgaggaagtcgtcgaactccatttctccatctcgcagcttctcgagatgctgaacactgacaagagatttgccattctccacaacaatgagaggtctgcaaatacgtccatcatcagtggcgacatggacggctcgctgatggtgattgatgtaaatgctgacaaattccgaaacccggcccatgcggcgcagtcttcggaaagcattgaggaaggacttggggcgtctggtcagaccagtcggtgtaccgttgatagaaattgtgtaagcaccccgagcatagagctgctgtccaccaacactcgatatgtcttcgacgccgagcatgaatatcaagtttcgcaccggtccttcttcatcgttggttgtgatatgcgtcatgagggccaagttcttgaccaaaccacatgcctcaccttcgggggtatctgcagggcacaacattccgaactgggacggttgcaaggcacgaggaccactgaccttacgggtcttttcgaactgactgctaatacgggtcatcataccgagagctgcaatgtaactcaatcggctgagaacgtgagtgacaccggcacgctccatgcggaaacgcttcaagctccagtttcctgtggagatggctcggttcataccctgagtaatatgatttccatgcatagtcacgatagtccaggcatcgaactgctcggcccgattgcgtttgttcaggactttgtcgatgttcatcttgatatcgaaacaaaatttcttgaacaaatcttcaaaaagaagggccaacatctgacccgccagctccagtcgtttgtttccaagataatcacggtcatccactagggctgggtcactctttgccatcagaacgcgacgagccatgtgagcaacgtagatagccttgggtcggaagttcatgtctttgacctcaatatgagaaatgataacagatgcaatggcctcaactgcctcttgcacgtgagtcttgcgataagcggcttgtttgcggttgatcttgatgcgacatccgatccactcgagggcttgttgctgagtgtaaacatcgacgttgattgcctcttcgaaatttatagcaaaatcatcttgatacagactatcgtcaccagtaaccatttgcatcatttccttgtcggtgtggatgcccatggccttgagcaaaatgacgattgggatgtcttcattgagtacgttgtgcttgacgtagagtctgccttttttcgagacgatgtaactcttagacttacgctcgtttgaggaactgtggatgttagggatagcaaattaagaaaggtccaacatgggacatacctggtaaccgaggcctggacgatatctttttttgggtcggtttccacaataattctgtttttactcaattgttcttgtacaagaatgaccttttctgttccgttcacgacgaagtaaccaccggggtcaagaggacattcattgaggacgcttatttgagcaggcgttttattcgacagcacacatttagaactgcggagcatgatcggaattcttccgatggggactgctcgtcggataaccctttgccggccacggacatactcaaagtcaacgagaatgggtgcagcgtatgtagtgtctcgtagcctacactcttgcggcgtgatcgtggactcgaaatcaattccaccatcgccttgctcgtcggctcgtcgaggggaggcaacgtagatatcagtaaacttgatgtagaagttgtggtccacatcacttcgaatcgtggagcttgactcgacaattttcttcatttgcacctccacgaagtagttgtaggagtcaaggtgctgcttcaccagccctttgaccttgaggaatgccggtagcaggttccatttgtccctggccgtatcgatagggtctgtgagccctttattgtagtaaaacggttccaaaagtgcatcgaatggatctctagccttgaaatccgaagctggttcaacctttccgggcacgggatgttggtgaggctcaggaacagggttggacacggacggacgcttgcttttcgtagagtcagtcgccgagtggtttccggcctggtcaagtagcaggggagtcagtatagccatcagaagttgcgacggaaaaaaagttttgttacctctgaaggacgtcgcggtcgactggccgcagagggctgtggcctcttgcgcgggggcattttggctagacagctgaggtttagagaaagcgatcaagaaatatatcccaatcaaaccactcagttgtccaaaaagaagctcgcaagatggattctcatggaggggaaagatttgagtaatttggagatggcttaataagccgcgggctggagctgatagttgcctgaggcattgacgataagaggatcatttatgtcttttcggggtttcatatattggctagctagaaggatacgtacatgatagctatagaagtgtcatatgagtgggaataataacatgaagtaggcttgccgggcttatcactcggcgacgggacaacataccttaaccttatagatgactttttgatgtgtaaccagggatagccattgaagattccggacatgcctgttaatttgactggaatgagatttgaagctctcttgttcccatttgatgactatttgggaaggatgtagctgcaatagtggaaacttttgtatagtaacgaggcagaaattcgtgatctctaatatatatcttgagacgaccttggtacggagtagatcattccagaatgaaaactgaaaatggggattgggcaaacgaaaagggcattcccgagtactttatccgttattgaaaacttaatctatctgaatctgtagttagatccatcttatcaagtaacggtacaaaatcgaaggcccggagcataccagcgttaactccgaggcagtcttggagaagcggatcttgggctatccactaaacgtgaaccgatttgaagaatgattcatgttagtatcaactactcaaatgtatagagctgtccagggctagatttacgagagccaggttgtcaaaggtttgtccattgacatggtatgtagtacatgtgggtcttttgcgcatgcaggccaccccccggacatttacgcctgcacggacacggacaaatgatcagaattgactcggttctgctcgagagagacgatctacagcagtgcatggtatagataacaacaccagatagtaaataagcggtcacgtagaagacaacgtggaaaaaaggcttccaccgcatataccaagcgctaggcattccgttcacaggatacggagtactgagattattattagtgcccatagttgcactgcttttgtggcatatgatttatcaagtactgggaacattcggtccttcatgtgcgatgtattattattttttgatgcctgtggcgaaatcagtttgaccgcaacttcgaaattgccacccttcgcttcacgggcacaagattgtacgcaatcttgccttttccggagggaattcccatatttctaatccagtgcacgaagctacagcgcaatgagtggtccaatgtatctgtcatagtacttgaagatggtattgatcgctgtagcaaaaggaaggtataaatatgtatatgcaacgccatccacacgtggttggtcagacaggggtcatcgccatccgatatgttctatgtactccgtactccatacagtatcctccgaggagataatcccgacgaaagcattagcaatgttatcgaccggggtatatccgttatcgacagcctagaaggcctattgtagggctttttcctgcaggggttggttggacagagggggcggagaccattttctggctagggagtttcagatattatttgcacaggtacttttggaagcagaatcatagtgacttctaccaagactattttacgaatgatttcgaattgtgattcgtgatatcaaaaccgaggcagccagtcaatttagggggggtgactcaggcgtcgggcatgaaagaaagtaattaaaattggtgcaattttgggcgtcaataagtgggtttcgaggctcaagcctgcgattagtgggtattacgagtgcaatcatggtgactattggatgctaggagaccaggaccatatctataagtaagtactccgtactccgtacggagtagttcgcgcacagttggggagttcggtgtaccgaggttttactccgtatcacttggacagcacagaccgtagcgagtactcagctcagatcgaaaaccataataatccatcgggattcttaacagatagtacatacatcgatagatagaggggaaaaagtggtccatgtttggcgatctctccgatgtgtgaataaataataaagatgactggggtttggagcatccccgctccatcggtatgcttgttatttggtggatcaggggcttcaagcgacgcgggatcagcgctgggtggcacttacaccgcttgtcctgacgtttagggaagcctgtgaagagtgtgatatgggggaagtttaaaaacagatttcgatgtgttcgagaaattccagaagtataaaagaaccttggattggctgaaaaggaaaaggaaaaaaggagccattggcacagacccgtggaacgagaacaaagaaaaaagaattaacccatggacgaggagctaaccgtttttccatggagcccctattttttctttcttccattctgatattggcatatactaccccaacataactataccggtaatccctatctcttccaatacttcatacaacctacccaggattcaggtacggatcaggtacggagtataggcgcctaatcattctagatggcgatctgttatcacatcttcgggcacttgggtcccatcagttctccacaagtattcaagaggggccaaatgcacctgcagctgccacgctctaccagcgcattccaccttcccctcctcacggtatcctagcacagtggttctcccgtgtatagcccaggctgtccccggtccaccatgaaattgaccattcgtagcctcttcaggcctcgcgggggctatagcccattgactaccccaggctcttcccgggacaaaagcgcccaggtcgtacagacaacagaggctctccaatcaatggaacccgatcaattcccgagtaagtgctggccgatcatctgctgtggtcaagttgtggtcggcaacatactatagttgaagtatacacaacgtgtatggatttgcaacgaacccatattatataacctcgagaatacactacgtaaataatgcaagatcaaaagattcaaaaggtcactgccaaacttctgactaaaacaaaaaagaaaaaaagaagcagaaacaaatcgaaagaaaagaaagaaaaaaaaaaaaagaaaactagagcacagtcatctcctaaaaggatatccccgctctgatctggactcccagccattttctccccctcttcctcttcttctcttttcctcccttaccaaatcccttttgtacaacagttttgtatctttcgtttgggtcattgttaggttgtatttcctcacgcgacacgctcgtttcgcccgcgcctcgatccctcggtgttcgctaaatcggagcggtaagaggagctttatcccaccctgcaactccctgctgatctccgcaccgtcaggtacacacgatattcccgctcgacattgcccatagatgacttgcgcagcttcaaatcgcatagcaattctcccatcaaccggatttgactcctctcgaggcgttcattgtgtgagttaggccctttttgcgagcgcagatcttctccgcctggtcaacccctcagcccctctctcgacttccccttgcttgagacgccgacgacacacacaccgccagcccacccttccctaccattcggatatttccccggcctccggagcacgtcgcgtcacaatatctggggctgggagtaattgcttccccggagaagctccctaaaaacaccgtttttcggcgtcaacaaattcctatatttgctgaccggtgcttgtatagttgaacaattcggcctgtccacgatggccttcaagcacgggctgagtgaacgcctcgacgagctgcgcttcccatccccacgatccccaccctcggaggctgcgttccctgggtacacttctctttccccgggtcattcaaactttggatcgggattctcgtctcgcccagctagtgatgttcgagcgaacctgcagcgtcggtttacgactgattcgagcaagttgtcgtcatggaattatttgaatccaagctcgggatctggctcgagctctggctctggttcgggccagatgcaagatcctgtggatttattgtcttcggtaagattgaaatttctttttgagttagccattatccctatgcattgaactttcgtatcgatctcgtttccattgaatggttggcgatgagtggggttatgtgaattggtgtgctggttgttcagcctctgtatgattctttgagatcaagttctgtcggcgtctggcatgtcacactaccttgcagcttgaagttgacgagaattcactgccattcatccccgcgattcatccctaccattcattccccgcgattcatctgctgctattcatcatccttatctcttatctctttcactcaattgcccattgtttcctattcatcagtttcctttatgcgtcaggcaaactcgccgaggtgattgatacgattgatgcgattgtcgcttattgatggttcaactccgtccattctgagcctattcatacttcaaatcgagtcttgctgctaggctgcgatccggtcaggattggtataagaactacagcttcacactttcccttttgcttcttcttttacttcacttcataactttcgcatctgttccatatcttcgactccgagaacgctcactgcctgtgctactttatttgccgttgatttcgcgtcacattcacattactttttctgattacgtcgtgcgttcggttggtattcctcttgcttgttctgtgtgtctacggagatatctttctatgccctttcaagtgtcttctacgttttttgtgcaattctgacaagttttgggcttccacttttctctcacttcgttcaaactgatatctttctcaaacttccttccctcttcctcgttcttttgcttgaatacatcattctggaaaccatatctgacttcttcaacagttcgagaaaaaaagacagcacattgagtacatgcgtgaacagaaacgccgtttcgaagaggatatgaaaatcctcgaccttcagcacgctcgcgagaaactggagatggaccagctcgctcgggacttggcacaggctggcatctctggtccagtcagtgagccaaccaccccgcctgagtaccgtgatactactgtatcgagcgcctttagccgccctgctcgtttctccacctcgagcgtgacctcttcacccggatttttcaatgcttttgctgcttcaaccttgacttcccccccgcctacttcccaacctgctcagccgtcgattgaccgatttgccggacactctgtgcccggttcacgccgaaactccgagaaggacgacttccttgccgatcctacttctcccttccgatcaggcccatcgtgagtggaaaccccatctttcgtgttgtggtatccagggcttagctaataattatttagcgctgttcaccgatactcgctgccctccggcaatccaaatggccagtctcatcgctccagcatctccggtttgaatggatcacgccttgacaccttcaacgttcccaaataccttttccccagtgaggaggacaagcctcaaagccatctgagggagctcgaacgcttgtcgactcctgacatcaagagttacatcaagttgaccgaacctgatgacaagttcccaaccctgtcccgtcgtggtgactcaaacatggtaagtttcttataattgaacacaaaacatcccgaatcctaatcatttacttagttgtcggcaaaccctgatgcccatgatctcgccaaccctcgttctccaggctcggagcattattccaaccacagtcggcaccggtcgtctcaccagagcatgccgcagaatattcacaactttgggcgcctggaacagctgggaagccaccataacgaggatcacggcagctttgtccaaaccccacgccacagtgcacgtcgttccatgggaagccagatgaccttccacgataaccgccatgatgagatagcaacccctgttgcctcgagccgtccaaatgctctgcagtcatcatactcaactaatgatctgcctactatcaagggaaatggagctggcaaagcagttactcccccgaagactcacattgagcacatgcatcaccacaataccagtatggggcgcattccccagagtggtatgaacaaccaggtcaaagccgagttcgatgagaccgacttctatggtaatcaatcgaatttgcacgcgagcgcccctcccttcgggcctcagatcaatacggctccatctacccaccacgttcctagttcggttgctcaaatgggattgccattccaagtgcctgcggttcctgccttcaattatggaatgcagggctatgtcggccaagcaaccccgatcaacggtcatatgcaaaacttcggaggagcttccgcctacaacaatgcctaccccaactatggtcctgggttccgctttaatgaacctgcagcccgaggcaccatggctcagcgtcgccaagagaatgatgcgacccagctcactcgtttcggcaattaccccttggagcattacaagggtgagttgtacagcctgtgcaaggaccagcatggttgccgatacttgcagcgcaagttggaggagcgtaacccggagcacgtggagctgattttcagtgagacttacatgcatgtcattgagctcatgaccggtatgaaacatttaccccttgcaccctaacccattgtcattactaaccttcatcctcgaacagatccatttggcaattatctttgccagaaattgctggaatactccaacgatgaacaacgcactgctttgattgacaatgctgcccctgagttggttaagattgccctgaatcagcatggtactcgtgcactgcagaagatgattgaatttatctcgaccccgcagcagactcagacagttatcaatgcattgcagtatcatgtcgttgatctggtgcaggatctgaatggtaaccacgttattcagaaatgcctcaaccgcctcactcccgaggatgccgagttcatttacgaagctgtcggaggcaattgtgtagttgtcggtactcatcgccatggatgttgtgttcttcagcgttgcattgaccatgcttcggggcatcaaaaggctcgtctgatttcgcagattacctcacactcgttcgctttggtccaggatcctttcggaaattatgttgtgcaatacattctggatcttgcggagcctagcttcaccaacccgttgtgtgctaccttcggaggcaacattcctcagctgtcaaagcaaaagtttagctccaatgtgattgagaaatgcctccggactgctgataactacatgaagcgcgagatgattgatgaattcttaatgggcaatgagctcgagaagatgctgcgtgattcatttgcgaactatgttgtccagactgccatggacttctgtgacctcgacacccgcaaccgcattgtggaggctgttcgtcctattctcccatctatccgtcaaactcctcatggtcggcgtattgctggcaagattatggccgcggataccaacagccgcagcaatggtagcagtgctactaccagcggccaggtcacccccaatgagttgagcagcagcgcacagatccccaaggccttgctgcagaagcccttcgcataccaccaaggtggtacccagagtactcagtcttcgagctcatccggcggatacagcaaccagccctacgtacctcaatcctcccagagctctgtctctaacactccttctggacaaagtgacacctcgtctgtttacactgcgcccactcctcagctgtccgcaaaggctggatcgcagcaagtccagaactacttctgattgggtctgggatacccacatcagtgcttgtctttcacacccccagtgtactcatagtgagacgatgcgacgaaacatttcttttttttctcttcacgattttacggttactttttacactgtcatcgaactgggcctacatcaactgcacatgccatgatcatttatcccatgatttaccacacttgcgttttactgcatacaccttcgaagcaatgtgccatgatcattgcatttggccatgttgcatactgcattttcatgaagcgacccgtgcatgatgcagagctcgttggaactatgttcctctgctccctgtgtttcgcaacatcttgtatttcttgttttccattcccccctttattttcccagttgcctttcatacctaggtcttgaggatatctggcaatagttggatcgttcatcggaacaatctggtactccattgccttaatttgaggactggttcgtttggcttgggttgtctttcttcttttttttcctttttcgcttccacattgtgattttcaactcttatttttttacccattcatcgttgtacttttgcgctttgctcttttcgaactgcgttttgtgtcgtgcccatccttcacattggttcattgtcgcatacaagctgagccgagcatggatattacaatgagtatggagcctttgttcattgatgaccttggttgttttccggccagcttattgcttcctcagattgatgatactgccatttggtactcggaccagatattcgtcatgcatgatcctgcacacagtttttgcatgtattttagcaatggaaagctgaattaagttttcatacaattttctcaatatccaactctagtagatttctatttctttgtcttcgtagttcattaagtttccgaggttgtcaactctgcagcgcgacgcgtgatcacgtgcgtaccaaccgagctgcacttcggagctttagcaggataccacaccttgcttttgacaccaagtcagcctacaaggtccaaaccatttactgggcctctcatgctaccaaaagaggttgccagctcattgagcacacaatggccatgtcgcaatgtccagatgcggcagctagccagtctgttgaatgtgagtttactatgcattccttccattcgccaatcaccctcggagaaagtgactgaccctcaatatttgaatagcctcacgttcctagccctccaaccttggttgtccatggtatttctgcgacctgcaaatcgactatcctccgggccgtcctcgctaccctcgaagtgccacacgccattgtcagaagttcggaatgtattacgggacggcatctcctgacgaaaatactatggaatacactggaggcactgggccagaaggaagaatgggagacctccggcaaaggaagatgcgagcacgtcagtggccttgcagtcttacttgaggagtgcctggcagcgaggcccgttcaaacgctaggcaaattcgtgctggtgctggatgagattgacaggcaaagagaggcaccgcatactttgctctcggcgctggcgcggctaggtgatatcgtgagtcgccgctttggacgacttttgcaagtgtaaaatgttgctaacccgataatttgtagattccatctctttgtgttgttctggtcctcagctcgaccccacggccattattcctccaaagtgcggctgttccgcacgtcagcttccctccctatacccgcaaggaggctatccacattattctcagttcggacgcgccggtcgtggatgggttgcccgatgaaacctcctcgcgggtatacccgtactttgtatctacagtctacgactcattggtgggaccaacagcaggctctataccggatttccggtccatatgtgaaagattgtggcctcggtttgttgcgcctgtagtgaatggcgaaacacccccgggcgggaacagtgagtgggatttctcgcggttgcttgtcaaaaacagagtcatctttcgacatcagggcgagtctgcgctggtgcaccacattgttcccgatgagactcctgctggcgagaaacggaccacgctggcaaaaaccgctatgccttcggccctcccttctctgccatatttctcgaccttgatcctcacatccgcatatctggcctcgcacacgcctcaacgactagatacaatcttcttctctaaattctcctcttcatccctttcagcccggaacaagcgtgcccaccaccgtcgacgtttgaaagtcctctcccaagcccaggccgaagagagacaagccgcaaacgatgacccttcaacccccaacaagaaaggaaagcgaactaaaactcgcattacaaaatcaacactatcatccgcctttgcgacctcctcggccaccacatcagctgtcggcggtggcgcaggcatcgccggcccgtccaccatccttacagcccgttctttccccctagaacgtctcctggccatctaccatgcgatcgacccaaaccccccagcaacaccacttcgagtttcagccgttgcagaccgtatctacgccgaactggcaaccctgcgacgcctgcggctcgttgtccccgctgctagccacaatgccatggcgactagtagtgggaataccactgccgatgcgggagataagtggtgtgtcaacgtctctggcgactgggtcggtgagctggctaagggtattggtgtcgaggttggtgagtggttggctggcggtctggactgattcgttttttctttgagatgaaggagttggtctttgtactggtgctttgttcttgcatttatcaacgggagttcttggcttgttggccctgcattgcatactggttttaattatggttaggtcaattatacccatgtcatcgttctacttgatcattgcctatccgtatgccagtaaaatgcttgcttatctcttagttgtggagttgcgtgttgctgcaaggccatgttcatcgagttctccctcgaatggctaattcctacggtgtgcgcaggggtatagattcggaagatatcttggagattcgacgtcgctaatcctccagtgtacctaacaatctatgctcgcatgcaaaaattaatcatcatacagcacaaatccaatacctgcattcgaactccaacaaggaataacaaagtagctgaaaacccaatcgccaagaaacgccaaagactatgcgtaaggtaagatccttatagcagagaagatggatgaacaaaaaaaaatccaacgccataccacctaccaagtccactgctcaaccacatcatcagtgccaaccaacaaactcggtccatgcgggccccgccactccggggtatcattcccatactcgaatcgcacacagctaggtggtgaggaatattgatgccctgtgagaggcgatgagacctgcagtccggtttggagagagaatagctggattttgcagtcctgggatgctaaagtgaaatgtatgttagcattagacgaactaaaatcgggatattctgatttttgaggggagcatacgactagccagaagaccgagctcggtgctcagatcgaaggttgggaacggtagtgaagagaattcggggaaagttaggtagggctttgaggaatcatgacgttcaagcatttttggcgcgaagcggaggtcgtacattcgtagctgaggtgaatgtcagttaaaaccagcccggacgtcgtatcggatagaaaagagaagaagaaggcgtagacagcgtcacataccgagctaggtcccgccgccacgagccggtactcgtccatctgcttcatttccatcacagcatcgttgtgtcggagacgtgtggcactgccaccactgcgcatgtcgtggaggaagatgttagagtttttctgtcctgccgcaatcacgtcctgcgacatccattccacggcatgcacgctgcgttggctgctgtgcttggggggtgctctggtgcgtgtgggaagtatattgcccttaaatggtttcttcgagagggtccaatggctactggtaccctctagggtgtgtagcccttctgaagttcctatggcaaagtaggcgcttgatcctgcgggctgggccgcggagcaccagaaggacatcgggtagtggggtctgatccgaatcgggtgagagactggaaggtcttgggtaagcacggtgtctagggatagagatacatataaagtcgtacatgttggccagcggtagttgccgccttcgtcgggctctgggaggagatgggccgaaaggaagcagtcaccttgcggtccttcgttcattgttgcactagagttgttagcagtgagtatatctaacagccttgtatggagacgtacagtaggtatcctgagtggctcaaagacatcgatcctaactagaatggggtgttaatgtgccttcaatggaacgaagtgctgggatcgaatgtgctcaccgaatacggctccctgaatagcacccgttccatggtgtgatcatagctccactgtgactcgtcaatgtcaggaaaacagaccctactcgctggttagtggtaattgacattcgccagcgctcatcaacttacgacacagacgattcatatccgcgagccgagccttgtcgcgcgtgttagtcacgtttcgagatcataaaagccagtgaaactcaccggcaatcaatgtcccagaacgtgggttgcgcaagacatatcggatactgtacgagctaggccatggctcgaaacgatggagttctccacgatgtagttggctggcctgaatgcgagcctgctgttcttgtctcgcacgggaggaagattcaatggctccaatctctctttggaggttgaccaagggatgtctcaacgatggcgcttttcggatcatctctttattctcacgttgtctgaaccgtgttttgttttcatgtgtctgcgattgattagcgaatctgatgaaatacatagatccctgctactgaccgctagctcagaccgctttcgcttcacggattgttgcgagtattgtgcatttgggggtgcaacatggttggcttgaatcttgaagtacttcttcttctccgggtctgtgatactcggtcagtgtgtgtagaagggtagttgatcactgcgtgtataaaacagtggcatggctagacagttcgatacagcccgtatgtgtcgctggaagtcaacagcccgcgcctttacgtactgtcctcgcgcacctcggcagaaggaaagaagcgcagcaaaacgcgacgtaccataatagaaaccagggatttcacgagtcatagttgctgataatgtgcgatgtcgagaaggtagatatcagggaatgcacgaagagggaaagtgacccagctatgttcaagttatcaagatagtcatgagccttccactttcgagtgtctagcacaaacgaacaaccatagtggattcgaccccaacaaagctaagcatgaatataaacaaacacaagtctatctgattaaccatatgagatgtggaagatcttgaatcgatttacatgaacaggcagttatatcagacttgaatttgaagacccgtgagtgacgtgagattatgtaatacatcatatttgtgcctcaggccgcagttctgatagctgccctaaacggcagtacacttgaactgaactgaaacatcttttgttcttgtttttgtatttgcttctgcttttgttgtgctttcattttgaatttgccctaatttatctaacaagattcacattgattaactccaagttctgatttcccacatttaatacacatatgccaatcaattgaatggtcgcgctttccaattgaatcggatattgcgaagagtcaatacattcaccacccgaattgcactcaataccattgactgaatgtcaactgagagcaacacagtataattgaatatttgaagacaccttgttatttttgcttatctttgtcccggtgaggcttgacaggcaaggcgaagttggtaatgactcccaaagtttcaccagccgaacaattgatgtcatcgtgaatataatttctgtcacttcttggacagattcctttccaggaccagggtgccgcatgattcattgtcacgccgtagcctgccactcattgtcaggttccgataagccagtataccttcttcaagcgtatggccggtcagtatcctgaatcccattgccgtagtttcgaagaatttctatagatagaatgaagaggcaatttctgacagtatttgctcattctccataggccgataatgacgctgcatgtcggaaaaagccctggcaggcggaggcaggcgtttgtaatgggccatgtgtcctcgatagtagttggcgcctagtcatcaagggtcgttccttcgatataaaacccacgatgccgaggctcggcgtttccaatattttctcctacaacacttgcaaccctttttctttcttcttcaccttttatcaccatatctcttgaagccatagcatcaatcccttcttctaggtatgtatcttcctggattattgttctttcatccgttgagagctgggcgtgcttatctgaagagcaaaatctttcccctgtgacttcccgttcatgtttcatgcaatttgctgtatcagagtcagtgatgtatcagaccaaacctcttgcacaaacctttgaattgaatttgtctgtttttgtttgatagtttgctgattcctttcagatcttactaccgtttcgccatcatggccagacccaaggttgacccgatggatcagcggaacgcacctctcaggagtcatccgcccggacctccctttcctgaagccagggacgagcatggttctcgtattgtttttattccgccgtgtggaactttctctgagagcgaccaacggggccgttcccaggaacagaaccaggagcataaccaatctcacagtcctttcaagcgacgagaccattctgaactgcctcccattcagactagtctcctggcaggggtggtttcagattcctcgactcgcccttcaggtaaatcgaactcaggccctagtggagagcggcctttcctgtccaagctcctcgacaaatctccattccatccgaacaagaccaccacttccggagaggaaaataaaggccatattcagtcgaagcacgatggttcccaagaatccaaggatgaagaggaatattacaagtttcgtgccagcttgagcaacagcttggaggacacttctcctattgaacagcaagacgaaagtggacagagcgacagcttgctatccgagaagaaagatcaggttagactgttccgttccagtctacttgctggtgccaaggcccaggaagatcgacgccgttccaagcgcactccgacatcccctgaccatcctcaaattggtcctaatgcggtttccgaatctgaaacgcatgcttccatcgttagcgagagcaaagactgcgtcattggcgttaaagagaacgacgacttttctctcccggagacattgaaacctatgacctctttccaggaagagagcgaagaatctctggattgcctcattgatgaactggaggccgaagatggcaatgaacctgacgatgatgcaaccactctccgagctggggaaattcgcccattccctccttccctgctggaaaccaaggtcgacgagggcctcaacgacgcagaggtgaccgttcggcgcaagaagtatggctggaatcgcatgaaggagcagaaacggaaccatttcctcaaattcatctccttcttcaatggcccagtccagtgggtcatggaggtaagcaagatcatcattgaccactatagcgtagttggaaaaaatatatgctcacactgttttctcaattacaggttaccattcttctagctggcggcctgcaagattggatagatttcggaatcatttgtgccctgctcatactgaatgccgcggtcggatttgcccaggaataccaagcggggaacattgtcgagagcctcaaggtaactcttgccctgagatctctggtcgttcgtaacggttgcatcgtggagataaatgccgaagacctcgttcttggtgatatcattcacgtggaagatgtgagttcatgaggaaataggaaaaaaagactcaggctaatatcccattcagggcaccatcatcccggcagatggcagactggtatgcgacaaggcctatattcaggttgatcagtctggaatcacgggggaatctctcgctgtggataaacacaaaggtgaccctgtcttttcttcttcggtagtcaaacgcggggctggaatcatggttgtgacggccactggtgatcacacctttgtcggaaatgcagcggtcctggttaacaaggctggcaataacgatggccactttactcgggtactgcgcgaaatggcccgtgttcttctgattctggtgcttctcaccctgctggttgtgtggatcagcagttattatcgctcaaatccgattgtccagatacttgagttcacggtcgcaatcaccgtgatcggagtccccgtcggtcttcccgtggttgtcaccacgacaatggccgttggtgcgtcttacctggccaagcatcaggctattgtgcaaaagctctcagctatcgagtcattggctggagtggagatcctctgttcagacaaaacgggaacactcactcgcaacagattgaaattgggagttccatatgtaacccccggaatgagtgcggaagagcttatgctgactgcgtgtcttgcggcaactcggaaaaagggcggcgtcgatgccatcgacaaggtattcctcaaaggtcttcgccactacccgtgggccaaatctcagatcgcctcgtacaagactcttgacttttctccatttgatccggtgtcaaagaaggtcactgcctatgtgcaagctctggatggtgagaaggtcctttgtgtcaagggtgctcctatgaccatcctgagaacagtggagaaggaaaccacattgtgcgagccgttcttcaaggaatatgaggataaggtcaccgagtttgctagtcgaggattccgtgcactcggagttgcccgcaagcgtcaaggacggccatgggagattctgggaatcatgccatgcctggatcccccacgccatgacactgctaagacacttgccgaagctcaagaactgggactctctgtcaagatgctcactggggatgcggtggccattgcacgtgaaacggcacgtagactcggtctcggaaccaacatttacaatgccgaacgacttggtgtcactggcgccggctccatgtccggctcggaagtgaatgactttgttgaggccgctgacggcttcgcagaagtctacccccagcacaagtacagtgtagttgagattctccagcgacgcggctatctggtggcgatgactggcgatggtgtgaacgatgctgcttcgttgaaaaaggcggacacgggaattgcggtagagggcgcgtcggatgcggcccgctccgctgctgacattgtcttcttggcacccggtctgtccgcaatcatcgaggcgatcaagatcgctcggcagatcttccaccgcatgtattcatatgtggtgttccggatcgccctgtccattcacttggagatcttcctcgggctctggatggtgatcaagaatgagaccctcgacctccgcctgattgttcttctcgctatctttgccgacattgcgaccttggccattgcatatgacaacgctacttattcgcagtcccctgtcaaatggaaccagccaaggctctggggagagtcaattgtcctgggcttcattctcgcagttggtacctgggtgactctgggcactattctgttgcaaggcgaggacggcggtgttatcgaaggctggggttcacgagatgaggtcttgttcctggagattgctctgactcagagctggttgattatgataactcgcatcagtggatctaaatcgagatcgttctgggcaaactgcccatcattttaccttatcgtcgccgtgggtgctgtcgatctgaccgcaaccttgatggccgcatatggtgccttcggtcaagccacatcctggttgaccgtcctccgtgtgtggattctctcctctggtgtgacatgtgtaaacacactggcttacatcttgatgcataactcgcaaaggttcgacaaccttatgcatggaaaaagtcctcgaaagaagtacggagagcgctcgtgggaagacttcggtaagttcgcacagactcaatgtctcctcgcagaattttaacgggaaactaaccaatcataggccttaacatgcagcgaatggccaaacaacatgagaagaccacttagtggtggctcgtaaccccgcatactgcaattgatgatggtgatgaaataatgatatgatgaatggggagatgcctctaatcgatgcattttaatgattttattaaatcaaggaggacagaagaatggaaggggacaaagtcttgtttctcatgaggcggccatgcccaaggggttgaggcctgcacgttctattattatctggacgctgaactgtgattaacagaccctaatttttaagtgattatcttgactcattgcctgctattgtatattgctaaaccttttgatacagtatcaattttggattgattattgtcacaataccttgaagccttgacggaattggctgacatttattttggagaaaccgcatcgctgcggccttacgaggcagtttgacaatcctgtatagttgctggtttcattgtcttctcacatacgatgagtcaagcatgcaatccaaaccatatgacttcactgactactacagctgagatagtattacctgtttaccgctaggcacattatgcatatacccatgaatggaaatacggcctaagcaccccggagcttaggctggatagcgaccaagcggcttaaagaaccaaggttttaggattgaaacctttcctcaaaccttccaacattttccctgacaaccctgctaagctggatgtgtatatgcagccttccaagctcgctatgactggtgataacgtgattcaacgagaatatggagaagtcataaatcaccaaacatactaaaagtggatattcgtttgaaataacattgaaaccaatcggctttgatgtcttttgccgcaaaagtctacggttctgttcaaaatatgttaagaacctggcagtttggtctagaccatgatatgttccctcccgtctacattggaagtagggctatttgatggtgtcactagctagaaatcatccgtctacataactacataaaatgacataatagttgattatcacccttgatatctggattgtataagcttacaagtttagcttactctttgacatgctctttggactgaatttgaataaattacacaaaacaagaccaaggctctgatgtctcactttggaaaaagtacttgtacattgttcgtgtcctaaaaagcccctacatacaatggcaccgatgtgccttcaacagtggccgaactagaattgcgccccccaccgtaatccacccgaaatcatttgccgagcagttctgcctcggtgtcggcctctttctgaaatcgcttttgtcggcggtacatccgccagaagacaaggctgccatggatctgggctgcggagaatgccagatgcaggaccggcgtgacaaccttgaaggcaagtcgccaccggtcccacgtgcttccaaacaaccacatcgtcacaaccgtctcggtgagtgtccccactgcggttgagaagcaggagatgaggaagatcctgctcaggagctggtgccgtctcgggaagacccggtagaggatgatggcgaagtgggggaatagctcgaacacggcgtcgaatgcgcctaagcccgaatcttgttagaatttttttcgtttcgcctctagaacagagcctcataaactcaccccagacggtacagaggacgaactcgatatacgtgtcgggttcacgtaaaggtcgcagactgatggctatggccgcttggccaatgaagattgtcccaacgtggtgcatcacggccacgggtgacaacttcacacggtagatcagctcgaaaatgtagatcccaatcaagatttgggcgaccacaatcagcatatcacccagtgtcactactgagcctttgacaaagggcgtattgaatgacggccctttgcagaaagcaacactgatgaacggatatgcggcgactaccaagataatgacctttgtgactccagcaatgtggtgattcacaaagccacgacggttcagctcgctcatctctgtgtagatcgagccgtacagacggcggataagaaatccctcgaggacataaaaacgaacgaggaagaagatgaccagtacaagagaaatgatcaaggctgaaaatggtgccaaatcggagattggccctagttgttttgtacccagggggattgggtgagggtgtcttttggaaaggtccattgtcgcagcgaatggacaagaaacgaaacgaaacgaagtgacaggaagtaataaagcaaaatgatgcaagaaaacaaagaatgaaaatcaaagcttgtaatacgcgttattcgcaacacgcgttggacacctgttgactgtgaaatcggaaaggttgaggagaattggggaaggagtcgtaacaaagaccggacgtagggcaacaacctcagcccccgtggctgtagacagcaaaccccgcatatccccgtagaaattgatctgcctgtactaaaccaccccgatctataaataattcgctgaccctatagtatattcagccccacagaacatacgaagttacaccgggctcactgtttctgccttggaaatggggttttcttgtcttacattgaaataagcttttacatatagatggtatatggtatatgagctagtagataaacgagagaacccgagtctctagtcttagacaagcagattggtatacagatccaaacctcgaaaggaaagattaagcccgaagccaagctttgcatgaaccgcggcaaaagcttaagtagtgggtaccgcaggtactctgcatgctgattggctgtggtattctcccttaagggtcattccccttactaggatcggttactacaccctgtttaggcaacaagataaataacaaggcggtctgcccaatagagcgtggatatactatatacatggaccgtgaatagtggagattgcgggaattagggaattaggttgcctagaaagtttcaaacttcggaaactttccggggaaaagtcaattgggaattgtatctaaaagactgacttcatgaacacaatacaaggcgcggctacctacttagatgtatatgacttttaacttggtaaatttaatgaacagagctgataggcaaagactaggaaatcaatagaccttgagaatccctctgggaaatccaccaatggctagcttgaatagcaatggccagcgcaatgctcgcaaatctgtcaagacataagcgtcggagaaacagatttctccattcgtaggaattcctcgtttacgaggtccattgtgttcccgaaatccagtcgtaatatagaaagactgtatactgcactttcagaatactacctggaaacataaccaatgagaaggttatggtatacttggtcgcccggcccttgctgagtaggaaagctggggccctgggcgtcaaactttgcgctttaattagtgccactgcttctgctgcagaatagattggaagggaacaatggccgtgctacctcggccacgtgttatgttgtttcaacgctaacccgaattcgatcgccggaggaacaatcatccgaaagggagtaatagttgccttgtagtcatttctaatgacttttttgatatcactttgcctagtaaagtctgctcatttagagcaaagatcatcaatccacacatttggcacttggcttttattaccagaagtagactgccggagaaagccacattcaatggctcgagaccttggaggcttcaaacgttaccacagaatcgtaccaagtgctattttccgctatgctacatttaataacggtgctctttgcagtttggcaactcatgccgtaacgggatacattgttcctgcgacccaagccaacatccaatgaatggtagtttcaattgggcagtaactgtccaatttgaggatgatggtgaatggatcatacggtcacctagatctgactatggtcaattcccgagtgaattgagcggacggcttcttgcgagtgaggcttcaacactgaagtaccttggaaaggttgcggatattcccatcccagaagtttattcgtataggtaagagtatatagcaggagatatcgactcattcactaaactcaaatagtgcatataccgactattgattagcgtttcctatatcttaatgagtaaggcacaaggatggccgcttcaaaatgtctgaatgataatttcgagttaagggaatgcatgtcccggggtcatattctccacgaacggtactctttagacgaagttcctcgtggtccttttgcaacagagtctgagttctacaacagtctgataactgccgtgttacatcatgcagagcccctccctcttacgccgcactgtttcgttgccccaataccttcccgcgaggactacgagaacgatactgcccatcaggatgcctgtgatctttggaacggctttgtggccattggagacaggattgattccgcggagaatcggttggattacatcattgtgggagattccctcaaagacatcatggcccaacgcacaactggctacttgacacactctttaccggatccatttcctctgcatcaccctgattcaaatgccggcaatatttttgtggacgacgatttcaatattacgtcaataatcgactggtcattttgttcttccgtcccactggcgatcctattggctcctcctgggctcccccaatcccgatatgcacttggcaaggaccttatcaaggtctttcgggaggggtataaggagacgtcccgcctaaagtgtcatatagaaaggcagtcgtttctctcttccgacgcgctcgctattctagaggacagcgagttttcctggtctcttattagacttcttacgtttgaatcgaccgacgatttgcgtcttttccgtaccctctggaatacagttcacactcctgactgtgaccttgagtcttttatcatctcacagagacacttgccccattatgtgcgactgtacgaaaagatgcaagtagaaacaggcctattgctgaacaccaaatggcaaagggattattttaagattaccatagatttgacagtggcacgcaatctcacggtggttttcaattcgaatgcatgctataaaccgcatttgaatcgttttcgaagtgcgaagatgttcatcgcggacccgaaactatgggcatgggtctcgaaggccaaagagcagcgcgctttatgatcagactcgaggggatacagtaagtgcgttctgggccatctaactaaccacaactaggtcagatttctcttccagagagattgctatatacttcatttatgtgaaagctgtctgacttttgtatacatcaagttccggatttgctgtcatcatggcttagctgtagtggtatatatgtaaccgtggtaggtaatggatcagataaaatgagttatacattatcacagaattctatttacaaaatagcaagggtatcatttgaacatgcagaacgatggcatcatgagatccatgtcacccacgaagatttctattctataatatcgtaaagtcagcagctactcaactgaggtggagatagaaaaagacaatcttacctgtctaagagccatcctcctctccgaagctcgtcgcttccaccctttcataccgatagtgatgaaaataacaccattccaaaagccacgcagggaccccaacgtactcacagagagtagaagcgagtaagatccatgctcatgatgcgcgaattccgcgatacggttgatggtcggtgcaatccacgttgctagcatcgctaagaagaaaagcgacggcatgatcacatactgcctcagcgacacacgtctctgtttcggggtttgataagtagtcgaggcgtttctggatggaggcggacgctggaacgtattttgttccgtgatatcgcttgttatggtagattctggagtcaacccagtttttctccgggaattcgcatccgcgcttgtcgtgatgctgctagcggagttgttagaggtcagagcgatgtgatcgtcctcgctcaatttgaactcgtcgcgcactctggttatctcgataccgatgagagagtacagtattaggacgattactattatcagcctgttgtggaactattagaaaagtgcttgggcgggcgaatggaagtatgcgtaccatacgggtgcatagtagaagattatgcgcaggatcatccaactgcgagctactgagcaccagatctatagaatttttcagcctcaatgtttagcttcaagtcgattggtactcacggtttcgtcgccatatataggacctttctcatgaccgcggatgaagagaaagacaaaggcaggtatgaaggagagagcagtgataacactaatgtatttgacttcgagcttgcgcaaagacagagtatcaaaatgatagaagacaaccaagtatgtatccaaggccattgcgaatgtccagagcacgtcggctactggaaacctatatttttggggttagaatgtctttgcgaaccaaattgcctcgacaaatctctgtcaataccacatacatctgcagcgcgaagccttggaattgacatagcgacgaagtatccccagctgcaggtccactagtggatatcatggtggcgacagagtcgaacagattataaaaggcattgaaaaatattatacgatgaatagggctccggaagtgtcgcgagagagcaaaggcgccgattattgtgaatgagcccagaatagagagcactgaagagattcgccctgcaatggcaatccgattgagctcctcgggagtgtacgacatcgctcagaccataacaagatcaacagtcacaagaattgccaacatggcatctatttgaatttgattgaaatgaacaagaagacatagagtttgtaatatcacgttgtgccgatgagtattctttgtccgggatggcgtgcttttacgtattcaagactcgacagaatgaatggcatttgatgtcaaaacgctaacaatgacggagtgcggagtacacaaagcctatatataccgaaatggcgctatttcgagagctttaggttctaaatagcctcataactcttgataatggcgatgaagctgtgtgtccagatcaaggtggtgggctcaggccatgtagttccagccaatcatggtccactctacagggatcaagcagcttatgcgctatataaacaaaccaattgctaacaggttcctggatttagacaaacaacgccatgaccgcgagtcgaggccatttgccccttggtatctcgcaggtcggacaatagagacagccctaagaatgtagtagctgtgcctgtctaccatttggggatcgtagtcttaccagtgtcagggcagatgccgatctgtgtgactgcttccccttttcgttccgatcgggatctcgtgggacccacaggaatggccggacgctttcgatcggacccgacccgaccctgcacggcccagcgagacaaggtatgtaatgtgaaaggagaaagacccttctaagtacggagtaggttatcttgtctaagtattcgtgctacatctggtttatttttaaacagataaggagaaagttcggagacaaagagtcggtattgtcgctaggaaagaacatgtttcagctacgccaagaaaaatcaaatatttaactcgattatggattattataaactacactacacaggcaaaacaaacaaaacacacccaaatccttggttccgagcaagtggcattgcgcaagaagccggttccataggataccaatgtgggagcaacatgagcaaaggaaatgaaagggaatgagagggaacgatatacacagcgccggacgaacggagggaaacatcgatgcaaaggaagcgatggattggccatcaggtccatggcttccatcaaggaatgagagacacaggcgcaaacgcaaaggaatatgtaggagatatgtgcagtgggaaagggagggtgtcataatcaagtcctcgaagtcaaatggtcggcggcctagtctttagttagtatgatttaaaacagaatgtggaaggcaatttaccttgtcaaggttatagtcatacttctccaaggcatccaaggactcatcccgtgtgaagcccatgccggtcagccgctgaaggatcaggtcatcgccagtgtcgttgttcagagcccatccgggctgcttggatttcgcatcgttcgcgtcttcgccgatatcaggcttggcgttgtcaagaggcgcaaagagagtgtcccattcatgcagcgcagccggcttgggttctcccccgttgggcgatccgaccggcggggcggcggatgcatggatattgttgtcgaaagcaaagaactgagacgagctggattgggcatcggcaccggagacagcttgctgcttctgggacggggagtcgaaagagaaatcaaagtcagttgtgtttttggcctcctgaccctgtggctcgtcgtcgtcatcgtcatccgcttcgatcgcgggcgcaagattcattcccgcaaatgctgcctcaaagtccggtcctcccaccttcgctccaccgggtgggatagcagcatccgagacagaatcacggttggtctcattgcttacaactggcgcacccgtggtgtgctccactgaatgaggcgcatccggtgccacagtcggatcgccgcgctcgggcaataggccattgaattgaggaggaagatgaacgttatcttctttagctgtctcgtactctggagggctctgcagcaccccaggagatgggggtttgtttgaggttcccgggacagggaaagcagccagctgagcggcgtcaatggaatcctgttgggtctccttttggacatttggtgcgggaggcgtgaaattatcttcgaatccaaaagcaccctcgtcatcagagctctcatcttcgtcatcgtcatggtgtagctcttgaatcggggggaattcggatggacgtgctgatgcagctccatttggctgctcagctccaggtacaggcttcatagaagcaaacgcctcctcgaagtcgttatcttgctgggattcggaccgtttgtgtgccttgctgccgaacagttcgtcaaagcttaggtccttgccgtcttcgacctggctctcattggcgacaggagttgctgcagattggggctgctgaacggttttggatggctcggggaacctaactgagaggtcttgtccttcctcctcaaacggggaccgtgccggggtgccttcaaaagttgaggttggtgcacgcgtgtagtcgctagattctgccccggatgtaggtccataatcactgctagccgcctgggaaggcgtagcgattccagaggtttcagcgccgccgaatcgactcgcaggaggcgagaccatagtagacgacgtcacagactgattatcgttgaactgcaggaagtttggggtcagttgtcgggactgactcgcaggcggtggctcagagaaggccccagaaggaaatgcaccaggcaaagagccagggggaggagagactgatggggtcgtaacagcagaggtaataggagatgtgactgcaacctgtggcgactcggagcggaacgaagtgggtggtggtccggcagcagggaaagctgcgaatggctgtccgaagaggctgtcaaatgccttttgctgatcatttgacacatcgggggaccgtgcctgttcactcgagctaccagttcgacggaaaaacgggttggtgttttggcttgtcgtagaggcagcagggcttacaacatcggccacactgccggctggtgttgcagactcttgggaatactgtggggtctcattggccaggctgtcaatttcaccctggagcttgtcccgttcgccttcgacggtagctaattgctttttgttaatggcaacaagacccttctgttggcgcgcagaagatcgcgccttctccagtgccggcttgagctgggcaacttcagcattggcctggcggatcttctccttcaggctggaattctcctgctcatcgctagccaaggctgtcgaaacttgcgtgtattggttttgcaaatcctggcggctgccatccagcaaggcatattgctgctgcagtttctgcgtctctgccttggatgacttgaggcgctcctcgagtgccttgaaattggtaacctcttgctcgtacattgaccgtgcttgcgcaagacgtgcctcgaagtcacgcttctgctgcgaggtttgtgtaatgctttgttcagcaaaggtcctcttctcctgcacagtgtgcatttccttggccagagaacctatttggttggacaagttcgccagctcagtagtctcattggtcaacttgtttgattcttcggggtcattgtcaccgaggagatcatccgatggaggcgggggtgagcgaactgctctcggggttgccgccgatgcaccggtgatctgtggctgcaagctctggccaaatgtagaggttggaataaaaggcttgaaggtttgcgatgctgtctgaggggatgccctagaggaaggcgagcctggagtctggaaagcactattggagcctccggtagactgtggcatctgaggctgggcgaatggcggcgcgggcgaatcgaggccgaacaaatcatcagcagctgtccgcacaacgggggcgggagccgggggaggtgtgggggctgccattggtgcgggcacttggcggcgcatattgggcggaatgagcgcgggcgggaccacctgtggcagcggctccttgccgctacgctgcaatctcaccaagtacatagccacggcaaattcttcccggctcagctggccgtctgcgtcgatatctgcaaggtcccaaatttgggcaagcgtctcttcaggaagctgggccttcatgaagaaagatacagcttggtctccagtaataagtcccaacttggctgtgtcaacagtctcgaatatgctatcaaactgggccttctcttgtggggtaatcaaccagtcaccaccggtgacctgggcggaaagagagcctacaaagggggagcgattggcttgattcatagggcttgtagttcgctgagggccagtaaattgctggggaatggccgggatggggggcacatcgggtctcgccccaaaagacacccgtgcaggaggtcccctgcgagctgccgcatcgtacagaccaggcgggagggtcgcagggataccgcgcagggcgccagatttatatgatgtcagtagatgcatggcaatggtaaactcagtggcatccaaggcacctcgctgcttagtgtcagacaaaaaccagatgcgacccagaacctcatttgggagccgagcgcgttcgaagatctgttttgcaatttcgcctatagatcaaacagcgaacttgtgagattggcaccttatctgcagggaagagctacatacctgagatcatcccgttcttgacgtccgacttctcgaacagcgagacgaatttattggcatcatcaggctgaaggggtggaacacgaataggtccattggctccaggtggagggcttttggttccggattccgggacgcttgccgttgtgtcgaccacaattccgtcaaaacgaggcagagggccagctatgaataggtgcgcgatcagcatggattccacttctctgaagggaacatcactcacattgcagagccaactcgtccgaaggtgcacggccagcttgggcatgtccaattaaccgcagaacaatcccgaagccagatggggtcaggaggcccctgttctctttatcggcaatttgccaaatctacaagacccctcattagctatccctctcactattgcaatctaacacccatattctatccacataccaggccgagagtatccggggataggtgagtcttctcaaagaatggaacggcgatttcaccggtaatgaccccgaggttggtggtatcggcagcctggaaaagctggaagaatacgcgcttttcctctggagtgaggtgaagattcgggtgtcgctgtgctaaaagattgtgttccgtcagctccgctagatcgcgcatatagagtgcgagtgcaagaaggggaggggtggtgatgacggaggtcggcgggcgtttcccttgagtgcgccgaagctctctcacgattcgtattggctctagcaaggaatattaagtattacttaccggtatcagccattgcagtgtcctaggaggagcttaactccccgccttctaatgagttcacaatcgttgggtgccttggtggacaagttggagacacgggatgctgtcagcctagtctgaactcgcaacaagcatgggcggagcgcagtatttgacagggacggcaagggcacgagatataggtaaatctcgagctccaaggaggaaataaacttcaagaggaatggggattgaaagtggctggaatcgatgtcgtagggaaacgttcctgtggctctcaaggcggtcagtcggtctagcgcccatcctaacacgttgtctcgccctgaaagggggataattctaacttggtacaaaggataattgaaagatgtttatgaatattcaagtctgccagatgatagaatggttcttgcacatgttgatccgaggatattggttgttactgtggtagtttctgaatctcaattgcctatatacaagcgacaatatatgccagctggagaaagaaaggggagaaaagaggaaaaccatgattatagtaagcaagccaagtatattcggaaaactctctaaagcatcactcaaaggcgtgaactgatagatagactgaagaccatagacaaagcgggaactacaagacgttgcatagacaagatccaacattggcagctcctaccctgaccataaaaagtgttagaactctctctcgattggtacgtgtcttcagggtccttttgtatacttccgataccgacgtgatcttgaaagaaatacaacgtaaggtcctgtagcgtctgctggcagcagaatatataaacgttcgaactggtctttcccctgtaacgtctatgcctgcggattatgtgtattaccctgaaatctacaatcaaagccctacgacagctcagttctagtcatctgcttggcatttacttggttgcctggccttccgggtcttgatcaactcatgcagctagttcatactgtacggtaagaaatcatggaatgagaggaagtgtatacatgtattgtattcgccatttgcggagtgtaagagaagattaaatctagtcatattgcttcggtggtaagttgtccgcgtagttacagggactggtacgctgacttctgcgtcaggggcagtgagaccgtcgccgcctatattccaatgatacattttcagttgaggcgtgaggtatttcagagagaaccagaatacaaaatccgagaaagatattgagaaacagcgtatggcttcacggccttggggctatgcaagcccggcgcccaagacattgattcaatgtccgactatgagacaacacacttggagagtcgacttagttacttacaaattgtacactttataagatccaaggagacagcgttagaaagtaataacaatggcatacgtatgtagaaaccctaaaggtggatggaacgaggggaaatttcatcctgcttcagggatattaaagatatatcgaacaacaaagccagaaaatcattggcagcaaaacgtatgttcccttctatttgcaagaagcccgatacacgcatgaaaaccgaacctccagactcgcgttggtccccaagccaacccgtagaagtgaaacaaccaagagtccgaagaccggtcaaataacatggctaatctagtactcgggctccaactcctcatcaccctcgatggagtcggaggcgacctcctcgtaatcacgctcgagagcagcgagatcctcacgagcctcagagaactcaccctcctccataccctcaccaacgtaccagtgaacgaaggcacgcttggagtacatgagatcgaacttgtggtcgagagcggaccaggcctcggcaatggcggtagtgttggacagcatgcagctatattataattagcaccaaatttttaatcaggtttcaagacccgaaagaatcaagaagaaaacttacacagcacggctgaggttagcaagatcgccgttggggacctgcatgggaggctggtagcagataccgagcttgaagccagtagggcaccagtcgacgaattgaatggtgcgcttggtcttgagagtggcgacggcactgtgggcgtccttggggacaacatcaccacggtaaagcagacaggtagccatgtacttgccgttgcgggggtcacacttgaccatctggttgttgggctcgaagcagttggaggtgatctcggtgacagagtgagcctcgtgggcggccttgtcggaggagatgatgggagagtaggcgaccagagggaagtggatacgggggtaaggcaccaagttggtctggaactcgttcaagtcgacgttgagggaaccgtcgaagcgcagggaagcagtgatagaggaaacaacctgagcgataaggcggttcaggttctcgtagctggggcgctcgatgccgaggttgcggcggcagatgtcgtagatagcctcgttgtcgaccatgaaggagcagtcggaatgctccagggtggtgtgagtagtgaggatggagttgtagggctcaacaacggcagtggcgttctggggagcagggtagacacagaactccagcttggacttcttgccgtagtcgacggacagacgctccatcaggagagcaccgaaaccggagccggtaccaccaccgaaggagtggaagaccaagaaaccttggagaccagcacaagcgtcggcaacacgacgcacacggtcgagaacctcatcaatcatctccttacccacggtgtagtgaccacgggcgtagttgttggaagcatcctccttaccagtgatcatctgttcggggtggaagagcgaacggtaggtaccggtacggacctcatccacgacattgggctcgagatcggcgtagatggtacggggaacgtacttgccctgacctgtgaagcgggggagaaagaatgttaggaagctgtgctttgcaattttgcatatcaaggcgggggaacattgaaaaaatcagggttttcctaccagtctcggagaagaaagtgctaaatccgtggtcggggtcggccttcttgcgctcctcagtgaggaatccatcgggctattatccatgttagtcacgggtgtttacctctcggcaagaaaatagggggtacgggtgcccgagtcaagattgggcgccagcacgagtttggaattccaacgcacctggataccgtgctccagacagtacagctaaaaaatcaatgctgttagtttaccgaatacttgttcctcgatgggttgtggatagttacctcccagcaggagttggcgatctggcaaccggcttggccgactgtagagaagggtcagcgcattcatcgaagaagatatatcaagtctgccgagtagactcgatggacgacgtcgacataccgttcaaactgataatctctctcattgtgatcgagtcgatgttttttcaggctaaaaaatcagggaggggaaaatgaaacccaaacaacaaacgcgacggtctggaactctcagttaggctcgaatacgaagatgcacaatggaagggggcggggttgggcttcgtacctgaagaatggaggaatggacgagaagatggaaaggaaaacaaagttgaccagaaatgttgtggaggaggaggcgtctgtgctgtacagggggaagttcgttgttgatccgttcgttgggtcgcgtccggcaatttgattggctcctccccggtgaggagtagcggctactgaccgcctcgtagtgatctcgtgatgccacgtgatatcattagtaccttgtgacatgtggatattaaaaaaagaatacaattcaagcttgaatagttaagataattcggcgctcgaagtttgccaaatttgtccagtgaagtgcccagggcaactcatcaagggtgtgtggtctgacgctgttggagctatcgatttaggatccactagggggaaccacctcgaaccaccattcgaccatcatagccaaagtactaagacacacacctcggtacagtatatacattccaacattgcacattcaacttttgaatgctaattgaactcttagcactacaattgtcaaaaactgcccgagtctcgtcatgggccgagaataagacatcactaaaacatcatctcgttcaccaaaaaactccctatattacaaagcagaacatcaagtctctcatcatgcatataaaactcattcccaccctgggactcatgctcccgctcttcacagcagtggcgcaagcaaacgtggaaaagaccatctttctagcaccaataccagcaatcgtcccttccgagcagccagacctcgacgacctaggtctagagcgtctatcaccacagaaacccgtggtgcgaacccagctaaatgcctcattcccaacggttgcggccccctatggtatagactcgtggttcttccttgaaaacctgaacccgggccagcggtatgaagtacgagtgtgctggctagcgacagtaagacaacccactaatcctccctctcgatcgtcatcttttacgcatgtaatacacatcaccgtatataaacacaactaacaaccccctagcaaccaacaacattcaccctcaccacctacccgctctcaaaaacaatcgaagacaaaaacctcctgtcttccctgagcatgtacacagcagcccgactcgcagcagcagacacaatccaagaaaatgtcatcccgcacagtgccaacgcacgcggtggcaaagatgtgctcgaccctgtgccgacgagtgactcggttttgtttctgcatgtgcacgccgcggcagattacttcagtacagatcaggcattgatgcagaatgtcccacccgtggcggtggatttgattcttgatccattcttgtttaatgttttcccgcgctcgttggtgccgactgctgggtggattgtacttgttgctgttctcgcggcagtgctggggaggtggattgtgaaggaggttgggagggctgtggatgatgctaggaggcaaagtgttttggaagagatgaagaagaactgaggttgtggttttccaaggttgtgtgtgttttggagatgtacgattgaactatttaaccgagcaaagaaaacaactgaaatatatttctttgttcctctgttggaacctaacgtggtcttttggcgactacctcactgttctgggaatacttcatggcgtccacgggaatgttaggtaattaactatgacaacgaaggttattaatgatgtccaccgacgaggaatgagtgggagccgagttatgcagagaatacccaatatcatctaagtaaaaatcttataaaagtactatcatggactctacattatcattagttacaagggcaagatttcgtagccagagtaaaactatagacaaggccaaatgacatagacgtgaaaggcaaaatccagataacataacagaacaattaaatgtcgaggtcgcaaagtcagatacatagggaggtgtgcttggatacaggatgagcaagggcaatggggaattcaaagggaaaagccaaagatataagcactgtatatgaggcgcaacagggacaagggtaaagcaaaaaaaaaaaaaaataccaaaagttcacgcagcaggaaccaacgtatagggccaatcaactctcccccgtttctttcctctctatatgcgtctccaagaaacctgattggcatttatgccagtctattcaagataagcccacgctcatctagatcaaaggacaagatcacaaactcccgttaaatcgtagctccatgaatggctcagccattgatacaaataacgtagcttaatcttaagcttagtcttcgaagaagttgaggatcgcgcggatacccctagagcccaagccgtgggacgggtaggaaatgtagagcggatcctcggtggcgccgagcttagcacggaattcactcttgcgcacaagatggaactgtttagcgagggcttcgtaggtgtgctccaacatcttgaccttggttccctgcaagttgtgacctgcggtgaactgggcagtggcgccagcgccaaatgtaaggcctttgacgccactcttagcggcggtctggattgcatgcgtgacaatatattcgatagtaccgctcggcgcgccggggaaatcgagactgtacttgacttgcataccatgggcaggagatagcattgccaaagcgacgaaggcgcagacgacgccattcctgtccagagcgtagaagtaccaacggtgctcgaagtcgcaccatgggcgaatctgggacaggtgcacttgcgcgcccttgcggttggacagccactcggtgatacggtcgtcaatcttcttgcgaatatcgtctggaaccatctcgccttggttcatagtaactagcttaacgttctcggtctcggcgcgacgcagcttacgtgcaatctcgccgtcagaagcggctaggttgcgcgatgggtcaatgcgctcttcggcgatacaagacaaactgcgccagcctagtcgttcgccaagaatagtctcgacttcaggcgagcagaggatccacacgggcttatacttggtttcgcggcgtagccactgcaagaattgtgtaattgtgcgtgtgtactgcttgggatcacaggctgggttaccgggaatgatcgcataattggaggagctgggcacgtaggcgacagctgcaccagtagtcatgtcacgccagatcttgaagcgttcatcaaaccaggaggttgatgtggcatcgccgtagttagcgaccagatgttccagaggctgcagctcactgacgtccgaagctgtccgagccttgtgctcatggtgccacggcggttcgatggtcgatgattctgggtggcggaggttttcagagacaggctttgctggcaaactcttggggtcgcgagggaacattgacgtcagtcggatgttgcccagcttgaggataagcatcatgatacgttccagaccaactccggcgcccgcgtggggtggtgcaccccagcggaagccctcgagatagtcttccatatcatccgggttaatgcccacacgacgcatgttttcctccagcatgtggggatcgtggatacgttgaccacccgagacaatctcttgcccacgaatgaacatgtcaaatgagttcgtgaagttgtcgtcatcaacgtcgggcatcgtgtagaagggacgtgcaccacgagggaatttgtcgaggacgtagtaatcagtgccgtatttctccttgacaagctcacccaagtgaatctcatcacgggtacccaagtcctcgtcaaaaggtagcggattgccctcttcgttcaaccagcccgagtcgttcaacatcttgataccatcggtaaaacgaatgatcggcgtcttttccagccatacgacatcttcggaggggaactggtacttgatgagatcaatttcgcggcggtgtttggtgtagatgcccgtgaggatattcttaatcacagcatcaagtgtctcaagcatctcatggtagtgctcatcaatagccatctcaagatccaatccagtatattctgtaagatgacggtgggtattggagttttcggcacggaacacagcaccaatctcgtagacgcggccgaaatcagaagcgatagccatctgcttcgccaattgaggagactgagcgaggaacgcagggcgaccgaaatagttgacttcgaagacactcgatccagactcggtagcagcgccttgcaatttcggggtatggatttcgataaagccgcggtcgtcaagggaagtacggaaaagattgcatgtcacggactgaagacggaagatggattgcgaggttgatgtgcgaaggtcgagaatccggttggccaaacgtgtccggtcagggatgtggttgcggcggccctcgatcttttcttcttcggtggtccgaatctctgcctcgtaaacactgaaggggacaggctcctcgcggcgaacttggaggtgaaccgaatcaatggccagctcgacatcatgaactgagcagcccaacactggaacctccggtttctgaacagtgccgcggactgtcacaaaagagcccacccggaggtgctccacccactggaccatggcgagagagattgctccctcccgctcatgcaaaacaccttggaaggtacctagctgttgacggaataccaggaacaccagtttggcactcattcgacggatgacgtgcagtcgtgcgctgaagaacactttctgtccctccatggcaagacttatgtcatcgagccgagtccgcacttctcgtgttcgaacggacgactgcattaaaggaagctcgccataacgcgctttcatttctggcgtctcctcggctgtggatttggcaatttcctcttccttgcggcgatggtcggtctcggagaacatttcctcgctgagacgactgcgctcgctgcgacggtgctgacgcaccaaccgcttctgttggtttttgctcaaggcaccggtagaagagtcgtcggagacatcatcagacgaagagatatactcattcttatcacggaggaagttgccaatgatgctgcgacgaggggatgcggtaggagaaccggaccgatctgtcgaggtacgaacttttgatggcagagcagagcgaacgttggaaccggaggagtcatcctcatttcccaagtgtcccctaatggccttggagagggcacgtttaatcgacataatgtgcttaagtttatgaagggagggggagaagaaaaaagagaaagaggagggacctcgggactttgtatatatatgggaaaggtgggggggggggctgcgccggaacgggcgatttcaaatatttcaactctgggaaggcctagagggtaaagagtccgatagcaaaacaggcaacgcgcacgtgaattagaacaaattgagccaaatacaatgacagaccaagagtttaaagaagtagagtcaatcaaaacacacacgtaaatttccaaacttataaatcctgcacacggccacagggctggaaaagatgtgatgacatcatccgaaaccaaggaatccagattttcttggtatggggcctggtggtccctggggagaactggccattgcttcgaacttacgactttgtttccctattactccaacggtttctctctcgttattgttatttccctcgttagtatcagttggctgttttgttcttcgttcctcggccaatgtcagatatctcgtctggtcttcccgtctgtccgtcttatcttcttatcaccgccggcttccgggcccctccgatgcgtatgccagatcagtagatcgaatccgttacttttcactacagcatcatggcttcgtctcgttggtggctgtatgtacaggccatattttggcggtttctgatgcgcattggcatgttcttgcacgagattggtccgcgcccaccccgaccgttattcacccgtaccgtgatatccgactcccattgccatccggtcgtcctccacttttactgtccaccggattatccagagcagcgaaggctaggccatcgcttccccgtcgctgtgaacttccacggaggcggtttcacgctcggtgctgctaccgatgattctcgctgggcgaaaatggtgctggaggataccggcgccgtgatggtgagtgtcggctaccggcgagcccccgaacacccttttcctgcggcagtagacgacggagtcgaggccctgctgtacctggcaacacatgctagtgaactgggattggatgtgagccgagtggcgttgagcgggttctcggcaggcggcaacctggctgtcacggtgcccttgcgactgcgtggcagaatatccaccgaagtgaaggaacatttgggtcgagccgaatccacgcaaaatctgctcagtcaggtcggcgatcttcacatcgttgcattgttctcttggtatccgattctggactttgaagaatctcgcgatcaccgtcgcgctatgagtctgatgccggacaagactctccctgcatttttcaccacactctttgatgaggcctatcttcctgatttggacgaacgtatatccccctatgcatctcccatccacgcatctgaccgtatcctgtctgaagctcttccccgcgacgtctttttctttatttgcgagtgggatatgttgatgaaggagggtcaatctttcgttcgccgattagagagcctcggtaaacgtcctcgcgccatgcttattgagaaagcccgacatgcgtgggataagtcacctaatccgtggcgggaccaaaatcgcgtggaccttttataccgcgatgcctgtgcggatatgaaggctatctttgaccggtgatcgatttgcttgactatcaatcttcccatgttttcttctcttagcactgcgggcttgaccttggcgtttgaaccattcatggtgtcgactttacatagcgtttttgatatgtttatcctactataactttattatcctagtctacaacgtacataaagtgtacctgtagctgacttatccaattgcattcgatcgcattggctgggatcatgtatccacctcagtggcaactttaaaaccaagcggagatggaaacatacaacgcctatatgctaacaaaaggacggcctacatatgtacgatgtgccaaataatatcactcggaacctcctcctttccattgtagtgcctcatctcatgccactttttgaccacaggtaaagacactacctcaatgcttatgtataccctccgccacttcttggtcactgacaggcatgaaaacacctggtaccagcaatactcatatttgcgccagcaaagctgcacaccgctgagcagagttttccgtgcctacaaaagacacgctgggacgattatcgagaccgatttcaacaagtgtcgaagctaataatgttaaggaacaaatcatctcgatcgaagcagtgtggactcaccgtcaggatcataactgggccatcccagggctttcagtccgtgttcgggatcagcgatgaatgagccccaggcggatcgcatctgaacctgcagctggcgctgcgcatcagactcagcaatcccagtaatttcagcagattctccaaaaatcatgttaaattcgacaccatggtatgctccactggtagggtaaagacgggtattctcccagtccgcgttgtattgaaagcgccaaactggtgtatgtcgacgacttcggtgtgcggcttcgagattagttgggcagaagaatgtttgcatgttgaaatcatcccactgttcgtctgtcagtgtcgatccctgggcgtaggtcgcgatcttgtagaatcccgcttcattggcgttgtgcccgaccaagtagggctgttggagaatatggttagtagctacattgacccatcgactatatttgagatgtaggagagcccactcacgatgcgggcgaattttccttgctgcgaaagaagagtgtaattctcaaaaacagtcacgtcgtccacggtgggctggaaagccggggatttccttgcagggtttgtagtcggaaccttcactgcactagcagcggcgagaatggcactcgcattctgctttctcatgcacggcagaacatcccctgaagacccacagcctaactgggcagacacagtataccaatgctccgctgcagttgtcctattgtttgttgggaagctgagagctgtgccggaatgcgagatcaaaccggtaactaggggttcggactggtaggcgtatgcccaataatcaacagaagcacttccgcaagactggccagatatagtgatgcggttaggatcacccccgaatccacgaatattttgcttcacccattcaacggctaaacgttggtctagtagaccaagattaggagggtgtccaggcaggccaggaaacccgaatatgttcatgcggtagttgaccgtcacaacgattacatcctcagtaccagcaaatccgcctccataataaaaaggagtatcagtcgtgccacttgtccatcctataacatggatcagaaacaagacattggaaaataagtagcaaaaacttactaccaccgtaaaaatgaacatagacgggcttgagttgatttgagtctggctttgaccaaatattcagagtcaagcagtcttcactttgagtgttgttatttatagccgcgaaggcctcgaagatgctgtcaaattgcggagttttgtcgggatagtcgaccagcttcgacaccgagtacatgcagtctctgtagattgctgttaaagaaagtagaatacaatcaccgcaaatagcactcactttccctatgttacgttcatgtcagacattcatacattttatgcacttcgggtgtaagggataagttgagaccatacatattctgaggcgacatgaacacccctcggcgtgtaaggttggggcggtgcgaatcgcaattgctcgacaggcggctgcgcgtaaggaactccgagccattccgtgacccctggattctttgatgcctcatggccctgaatgattccattcgacccgacatgggcctgtcgcgctacggcaaccactgcgaaggccagccatattactcgcatgatcaaatatatccctgattgagtcggaggggcaaaatcgagggaaaatagactgtgagagaaaccgcgtgttgaaaatcaattgacgcatttaatatatcgtcaatatggctaagtggggcttgcatatatatggagcctgtagaggtaagccctagtcgatctggcgtgctttgattcgggttcgctgtctcaagtctccatttggcccccaatgagccgtcccaggtcatatctaatgcctgctcgcggaacaccggaagccttgatctttgatctcacgagagacagctctctctcctcgctttgtactcatgaaatgcacattggctatagcctatgatcgttccgatctaatccaaccccatttggcttgacaatgttatccagagtatgacattttatggccaaacaaatgacggtgtcccagataggggccatgtgcttttcattaccgcgcttgtgatggtgctcactgcggccatatttgttaccattcggctagcaacgaggattcatctgaaaaaattcggttgggatgatctgttcctcgtcatcgccctagcggcatcggtcatgacaacaattgctgtcaatttaggtaagtcaaaagacatctgatggcgggtcttttagtcacaagctgacctttggtttccagccgtcgtgcatggttatggcaggcgaaaagcagatatgggagagggtatacatatagctctgaaggtgcagtgatatcaacggtagctaatgctcgttcaaatctctaacactcccccaagtggttttttgttgcccagattccatataagattgccctcggctttaccaaagcttctatcgtcctcctttacctccgagtatttatcacagagtctttccagcgcgtgggaaagggtttcctaaccgtcattgccgcatggacagtcgcatcagtcctcgtcacaatctttcagtgtatcccaattgaagcttcttggaaccataatatcaaagtcaaacaatgcgtggacaaagacagctggtggtatgcatttgcgggaattaacacggttactgacgttctgatcgccattctccccattcccccagttcgccacctgaagctctcgaagcgcgaccggattgggttgtgttttgttttcggtgttggagcattgtatgtatcatttcatcctctcttctctatgcattaatcaggagtctcatgtgtacacagtgtctgcgtcactagtatcatgcgtacggttgcagtgtctcaaacatcgactggcttagatcaaagctgtgagtatcttgggagcctcgaaaaaagggaatgcagagaacagttgctgatcaaaatttactataggggattttatccctcgctcagtctggactctcgtggagtgcaatatgggaataatctgtgcgtgtctccctatgatgcgccggccgctaagttttctgtttccgtggcttttcagaggctcttctcggaatgaatcagaaagacttagctatgttcccattgagttgaggtatacaaatcgccaactgcgtccgcgcgggagtcaaagccaagaggaaattctacagtcagatgtgcgagataaaagggctttggcggatgaggaataagataatcccatctgtgctacgacggagattcctgtcggtttttcattgcttgcgggttccaaactgcgtacaacacctttagattagagaaagaatcatccaaacggacaaaatatgtatgttaacgatcctcaatatctgcatgtcgtttattcactagtctttttgatactactggtgagcgccatagtcagattcgcaaacaaacagttatggcactgggagttatttccatttaaaaaagaggcgttggttggtttatgataacgcgattatagagaaatttctcatttgaactactattacagattctgcgagcttgtcaattggaaaatggaatatttgcattaatgtagtgctgaattttgcagaggcagtgtttcgctgcgatgagtaattccgctagaggtcttcaagaggctctgagtggccacacaaggatagtcatatcgtgttactatgacaagccaagcaaacgagtatttacacaccaggaaatcttcctggttaaagtgcccaccgaatgaggtatttggtggatgaatgttgaatgtaacaaatcgagagtagtggtttgtaagtttttgaacaaacaactcaaaattcgtccctcaagcctgtctcctgctcctcgctcaaccgtttctcattcaatgttttccaccatgcgtgcgatgggtcttggctcggtccagtttcatcccatggcttcgggctgaggatgtaatgtacatttttcacattctcatcgcgccatatagcgtcatgtacaccttcccaccgcaaggttttgagtgcgttgtatatgtacgggagtgcaacccagcgaccataaaacaggtcaccgagaagggactgatcggcaaaatcataattcgatgttgtagaagcaccaagctgtgcaagaatcttctcgtaggttgcctgagctgggatcaccacctgaaggcctccattgggtatccccaaccctgaagtgggtgaagcaccggcgatttgcgcgatgtcgggattttcatgctgcgtagtatatgcgcaattggccggaatcctttcagaattatcgaattagctgcactgtatgtcgcgcttgtatattcccaaataaaggttgctcttaccagtctgcgggatagtgaggtttatgaagcggattgcagctgcaagcatggctagcggcaaagactcgatctccgtttccagccatttctggtgaatccaattcgacatccattaattcatccatatttttaaggactagcatgtcactgtcaagttgtacgacacgctcatattcaacaagtgagaacggtgtgagtttgctccaacaatcgtagaatcgtacatcgttggtgaaatccttgggagctgacggcaggagatacggcacatggcgcttcaagattttccgggaatcaagggctttgtggccttcggcagggaatgtgtccgtatagagcacgacaagcggatactttgacccgacctttctgagagagtactcaagggtcaaaagcccagagaggtatgcagtatttgttatgagggtggtccacactgagaattgttatcatccggagaaagaaagtattgtagagtttcagattgccctgtcgatctgtaccttttgaggcatgtggctggaggatattctcatccatgatttgattgtggcgctgaaattgcttttttttagctctgactgtgattgattaggtgagaagtcagcactcacatttagcaattgtaacgattggaattggctgttgcactaagtacaatgcagatacagggagttagtggagtgacaagggagcgcgcattgtgggtgaggggttcccgaggtcccttcctccggtatcggtctacccaatgaggggttaagggttagttgtggtgtgcatgcaattagttagcatatccaatgaatgaaggccacgttcggctggataacactagactggaaagaatttattagcgaagcactattattcgtcggatttacaatcagagttctttaggctaattagagtagtcccgtggcttgacctagtttctatttggttcataactacggagtatgtaacccgtattgatatttatgctcttggtgagctgcataactatcgatgtattaacctacgtttattttctatgtacttcttcggttgaaactatgtggtcttactccgaatgacaatgcctcaaagatacaagcgtgcatgtaacgagccgaaacacagatattttagggcttggttgcttaaccgccgacgctaggctcaatgcaaatcgatgtgcatcgatatagagtgattggacatctccgggcgcatacttgcattagttagatatggccaacacataatagtaggttaaatttaggcatcctactttacttattacaatattaaggaactatcgagaagcagaaagccgagtgctgcattatatctattcataccggcccaagacagcaacaattggatttgcgcttcgaattgtgtattacatccatccctagcatatttcaagttgattagccaaaatcaccattgaagtttcctcaaattttgctacatggctttctttagctgtgacactcgtcggtcttggtcctatcgctactcggttcggcaccattgtcgaccggacagatcaattccatgacctacgagacatgctgcctttaggcagccggtggcgccgacaaccatatataccatggtaccatattgtcaaacccccccccctgttgggcccttatgagcgcaaacctcttgcatgggctctgcgggaacaatatggtatatgtcagtggttcaccatcatcatcacaccaagttggccaagcagcatggtcggtgttatttgcagttattcaccgaggctctcatatcaataaataacacaaattatcagagaagctctcaacacatgataccatgggatttgaccatatagtcacaattaccaacgaatcttaccagatcccaccaagtgaaagctgggctgatatgcctcttcgtcctcttacgagacaaaaattgactacttgtactgtgatttcacgtacaacactcatggcattgttctgtaataacaaatgcgcggcgggtattttgttatagcagcgcttctggtcatcgagctgcctatgcatcctactgcggacaatggcgcgtggaatggcccattggagaccttgcacgggttcacttttgtgcgtatgacctgcacacgttatcaaaggacccatatccggcaagattccagcaaagagtcgataagtgcttacagatactggctggggtgattgaatcgcactcatcaaatacattgaagtgtgcttttccggcacgcaaatcagccggtaaatggattcttgaatatacacctaaaggattcggcggtgcgcatggcggaagacatctttacaacatgctcggcggcaaagtgagcgaggtcgacttcttgcccatgaaagtgatacacacagaaatagaagcatcaaaggacatggtggttcttcacttgcctagcaaagattccgatgtgcgtgatgtgattttatacgtctcaaggcaagaatcggccattttcaatgaagccgtggataaacttccttggacatttctgtcatggtcaattcatcgagggctgtgtgatatcctagttgcttttgcaagggaaaggatggaccactatagaaaccgtttagcagagacattctgtcttgcggtagcaaaatggccagaaagattggaagccaggggatgggacccgcggtttgtgagagaagatattgcagccatggcagcaagccctgttacgggcaagccctgttacggcgggccaggggaattcaggagatgtcgtcaggattgtgactgaaatagcagcgactttatctggtggaccaatttcagcacttgatgagacgaggttttggagggacgcaggtcccacatctgattctccaatccttgacccgatgaccgtcatcgctcttgtcaagtgtttcgtcttagagtggagtgtgaacttgaactaccagatgtaccacgattttcctctagagatgtacctaggatgaacaaataagaactgttcgaaaacttaacattttgttaagtgactcattgaacagtgccttcgtcctcggtcattccgcacaacgatcccactttactcttcactaatgctagcatgagccattacaagtacatcttccttggtactgtcaatccgcatacagactttgcccatttgaagcgcgctaccaattcccaaaaatgcattcgtgcgggtggaaagcacaacgacctcgacgacgtgggaaaggataactatcaccacaccttctttgaaatgctaggtaactggtccttcggtgactacttcaaacaggaagccgctgagtactcgtgggagctgctcacacgcgtgtttggtcttgaccccagcagactctgtatcacctatttcgaaggttacgcccccctagggcttggcccggacattgatgctcaagagatctggcgtgctattggcggacccgatgaccatatcatcctaggaaacatgaaagataatttctgggagatgggcagccagggaccgtgtggaccctgcagtgaggtccactatgatagagttggtggatgaaatgccgcttatctggtcaaccaagatgaccccgacgtcgtggagatctggaatattgttttcattcaattcaacagggaggcagacatgtctttgagatcattaccgaacaagcatatcgacaccgggttgggcttcgagcgcctggtctccatcgtacaaaacaagtcatcgaattatgacacagacctcttctcccctctctttgaaaagatacaagaaatcacaggagctcgtccataccaaggaaagtttggcaccgaagatgatggcattgacaccgcctaccgtgttgtggccgaccatgtccgcacatgcacggttacgttgtacggagaatcttacgacgtggtgtgcgatacgcgaaagtcggttctttcttctcgaagattgtgcttacagttgtcgaacagatcggggatatcttccctgaagtcagaaggaatgaacagaccgtgaaggagatcctcgactaagaggaagaagcttttgctttaactctagaccgaggagaagcgacgtttggcaaatatgcgcagaagtgtcatgagagtggttcaaaggacctccccggagcttacgtgtggctactatatcacacatatgggttcccggttgacctgacaaagcttatggccgaagagtaaggtctgaatattgacgaggacgaagtgtccgccgcccaagagatggcccgagaggttagcaaaggcgaaaagaagagtgcatctgatctcgtcacgctcgacattcacgatctcgctgctctagagtataaagttggcatgtgtaaaccagatgatgtggctaagtataggaaaggttccatcagcaatctcaattttggacaagaaactgttcgcaaggcgactcgaaggaagcatcaaagagatgatgaaagagcaaaaagaaacgcagagaagtcaagtcgatgctgccatcaaccatgtcaaaaccgtcatcgatgataacccagccagcacctcgtttgttgttaacctcccgactgattgttccgccaaagttattacggaggccattaagcatgtctcttctatccacgacaacaagagcgtgtatttcataggtgtaggtgccactggcagggttgcccaggggtgctttgtctcaccggtaagtttgtttcaaggaatagaatgagctgttttaacctatattactagaaacacacctcgaataggctggtggcaaatgaatgggctgcacaggttgcgaaagtcgtgggtggaaaggctggtggaaaggctggtggaaagggtcttacaagtatggggagcggaccggataaggccaaagtggaggatgggatggtggctgcgagaatgtatctccaagaactgcggatttgatcatctgagaagatccggaatagaatgcatacactgtggattgaaggagaaacaatccggccatatccaaggcagataactcgaaacctacacaaatcagcctcaagagttacaagtggagattaattgtgccaaccagccaatagaaaggaccaatttcaaatttccaagtgattcagtcgcttaatcgggactttaagggtcctaatgaaatgaggtctcacttaaaaatagggtcctaaaaaagtcagggggagaagaatatcgtgatggacatctcaatctctcagcatcaccctaaccaatcccacggcatttcccggattgatagagtggtgtattattccctctctggaacccatttctacttctacaccgtcacaccgtcaccatgcgtgctcaggggcggacattcacaaaattctcaaccgcaagcatactgatcctatcatgtctcttcttcatcctctattaccaccccctgagagaagcaacaccagaaagctaccctacatatgatccatctagaaagggattccagctggcgtcgccgcggatcccagagaagatctggtacaaagttggacctaaaggattgagcgaccagtcagaggaatggctgcacgattgtctccacaaaaacccagcgcatagcgcgcagatcatgaccgacctcacgggcgatcaatatgtgcaagagaacttcggcgatcgtcccgatatcgtcgatgcctacctttctctctcggtaccgattctgaaggcggatttcctgcgctatctgcttctcttcgtcgaagggggcatctgggctgatctggatgtctcgtgtggggatgtacccattagagaatggatccccgagactatgcgtgctaaagctcggctggttgttgggtgggagtttgatgtgggctggggggagaatttcatccggcagtttgagagttggacgattatggcggcgcctggatcgccgcatctgttcatggttatcaatgatattatggagggcattcgtcagaagacggaggagtatcaggttccggtttccgggttgactttggatatgacgggtaatgtgatcgactttaccgggccgaggcgactgactcgcgggattttgaagagcttggaattggctcgcaatgagacgatcgatatggcgagtatctcgaatcttttggagcccgttttgctcgatgatgttttgatcttgccggggtattcgttcgctgcgtcgtcgaattcttacagcaatgtgaatgtgactggtccttcattggtccagcatcattatgccggcagttggaagaatcacaatggtggtgagatctgaccatggatatgacttcatgtacattggattttgtatagagccatgtgatttataaggcagttgggtcttagaccgttagaagagttcacgaaatttcatgtaattattttcccattttttgaacagctagatttatcagcactatggtagtacacgaggcacagatttcccaggattccaccggacagttccgtgaagaagaacgatatcgtcagtcataaggtatcgggaactttttgtgagaaaaaaaaaaaagttgaagagaaaagatcaaatcgcaaatattggtggaaatcccggacgccacgctgaagtaacaaaaaatcgaacgaaacatggagtcctgattcgaggaagatagatagtgtcaaattcactcctcgtcggtctcggtggcatcctcgccgtcttcatcatcggactcgtcaactccgctgtctgactcgtttcccccgtcgagacctggaataccgcgccactcgacgtagtcaccttccaaccagcgacggctacggggaagctggtagggatcgaaggggaagtatgcatccagttgatagccgagatgatcgccggcgcggatctcgcggccgacatggttgaagcgaggatctgagagattggaaatgctcctgaaggcagtaacgcgaatgcgcttgttggtctcaaggagagggtagacgtataggaattggaagtggtgggcgatacgggcgaattcggcgacgatggccggcgagcataccttgagcgggttcaatcgcgaatagatgcatttgtgaaggaattctttgatgttgggaggaaatgcgatctggcccggctcaagctcgtccacctgagccgcagtatcaccatcgacggcagcggtagtcagatcgcgccaccggaaacagaaaatgtacagcagagcctgggcggtggagtagaaaggtccgtagcgacgaagatcgggcccgcggcagctgtcctcatagtccatacgtaggctgttgaggtgtgtgaggaggagatcgaagacgtcgcgaacaacttctcccgagatatgggcaccacgggcaacaaagctggccaggtatgcggctgctgactggcgcaggatattgggctgcagcttgttgaagatgagctgtacaaatgtggctgcgaagcgatccacgagcacgggcgaagcctgggagaaatggaacaagaggaattgcgagtgacgggatcggtatgtagggaggatgatcgtctggaagtgactgaggagcaggtctagcgcattctccttatcatccagggtgcccgaggtgaacgggggtgagaagtattcgaagaggatgtcaatcatcccgtccactttgagaatgttatccttgatcttcttaggccccttcatgtcgtcctcttccgaatcttcgctggaaaccgaggcatcatcatcgtcatccgaatcatcaatctcatgcaaaaattcatcgccgacttcctcttcaaagtcctccatatcaacctgaatttcaacgtcgaccttgacaagcttctcggtaataagcgccaggatgtcggactgaagctctggggcgtaagtaatgatgtggatgagattgcgggtataggcaatgttcgcgctagctgggtctgtgtcgaagggaaactgggtagacaaaatcggggagagtgacccactaccggccgggatgagccgcagcacatggcgcattgccatgtggactcgagtatgcatttcggatggtgtcacgacagcgtagccagggagtcgaccgcgtcttcgagggatggacccgagatttgtggctaacatcttcaagacgggaccaaggaaggtaccctgtgcggcggcaaggttgcccaggaaccggatatacagcttcacgtaggattcgtcccgtccgagccactcgctgttgatgatggcatggaccagtccgctgcaggagcggtccaaggaggcaacatgcgagatcagaccaagaaggtggtttttcaaagatgtgtgtgttggtgattcatatgcaagcaggctgtcatcgtcttgctttgttggatcggcagaaaacattcccttgattcggtcgtagccctcgctttctgacatcgtaacatgtcggtggatagcccggcgcatctcctctcgaatgaatgtcagactcttctccgacgatgtatcctcatatatcttcacatcttgatcgaactgtacgcggggtcgcttcttggtaggaggaagggcttctgtcgcgtcatcggcctgggatgaggacggggatagggggaggtccatctcgctaattttgcgtttcgagccggcgaccacaggaggagccttcgagtttttgagaatcgggactggagaagaagccggaagcattttagatcgagatatcgtgggtgtggccagtagcgccggtttgcgtgaagtcgtggctagggagaccatggccgaaggtgcggaagaagagatgtaggacaggttctaggcagaaaccggtgtcgacatttgcttttctgcactctggcagaaatcgaatccagttgactttcaattcaacggagcttatcgaagactgatccaagcacacgacacttttcacgtcgagatcttgaggattatgctacagattggaataggagaaaaaggcaacagtctgtctgcatccgtgggagtccagttgtttgagatagataaaatcggatgcagacagaatggtcgagttgctggattccaagcaaagcaaagtgaaatttttccttttccttcggtcacttgtggagcccggcggacacccgtgaccgtgtcggtgagccctacgctatacctaattgggtaatattgacttatgtcatcatgtactcattgtcgggatgtagaactacatcgtcacatcttactttgttcgacttggaaggtagttttgaacgtgtttattggatcatatttgagattcggaacgagacatcacataagactcccaaaaagtccctgaaagaccgcagaaccatcatcaagtacggtatgaagcagttgaacccaaatgatacatcaatgcataacgataaaaagaccgtctaatacgggaagaagtaaaaaaatggcatgaatcaattcaaaaaatcaagattgagcgcaggaacacaaggtcctcccatggtatcgtgtaaaacaaggggcaatagtcgtaaaagaaagaataagagttggtcgtcttggcgggtcaagcgaaggaatatccagtcccttgcaagtccgcaatctcgtgtcgttgatcaccccggatcaaccgggggcgcagcaattacgttagaaccaagatgtggtcataggcccacgtgtgtcctcgaaaatgctgccgtacagttcttcaacttccacaagataatcttcgacggagaacttcttgagccccttggcatagaggatccgctcctcgtcatcgtgcatattaaggccacaaaaatcctctacgacctcgttcacctgctctagctctttgccgaatggatgcggctcggcctggaagaattcctgtgatgcacgaatggtcggtgtggtgcgcgctgcattcagcggcggcggggacatcctcgagactgagcgcttgtgagcgagctcctggtgtgaccgcttggtgtgggacagagctcgcttaggcaccatcggagcatctgtatttgacgaagacgtggaggagcgcgggtggcttgtcaccgaggccgtatgcttcgggaaatacgacgccaatgggtttgcatcaatgggagagctcccatgaggggagacatcgggcgaggacaccgaagacgcgtagctttgcggagaaaatgcgttgtcggagtcgtcgcgcgatcctagtgacgaagcagatgaagagccggcagagtaacctgggctgatatcgggtgcgttgtaggccagcatgttggtcgtagacaagagctgcaccggtccagatatgttgctgcgctttatacttgccgagttgagtcgcagattcccttcgccacgatacggcatgggtgcagacacctctgggcgcttattgcgccgggtgaatgctctcgtgagggttgacatgatttgtaaatttggtcaagtttaaaatatggcaacggtgcgtttcagcgtggttgtaaattgatttagaattttacacatgcaatgtgtgcgacttcgttcgtttttggagtctggtcgctctttgcgatcggatgcgttgagtctcgcgtggtgagacgatcgcggaaagaatgtcagatcaactggaatgtccagtatcagatcgaagtgtgtgtagaatttcgaattctagttcacagtagaaaatgaatgtcgggtcctcttgatttcgcacagcaaaatgtagagaataacagccttaaggaatgtgtttgaaataaaaaaatcaaaggagtccaggatctcagatcgctttgtatctaggacttaaagaataaaagaataaggagagaatgaaggaacaaggacacaatcccaaggaggttggaagaagaaagagagggggtttcctccttacgggggattatgggcgctacaccagcgtttgaccaaatttcacctggaccagtcgcaggacacccaaaggatgctgatggagcccaatcaaagagttcggtctagaatatttggcttctcagggcccagttgttcttgacgatcagactggttcatccagacttttgatcgtttgcctcattctacggtatacgaactacgcctaatattggttgaccttgaagggggcactccgtacaggtacttccgaacccccgagttggttccagccccatcttccagggctatcttccagggtcggatatgtgcctgggtatggagggcgtacgtgttcaacgtgttcgtgttcgacgtgtccacgggtcctgtgctggccctgagttgatatgaacaacctccctagagcatgacacatacagcgggatgcgacaatatcccgagaataatataattgaaacggatgcaggtccgaattcttagtctgaaggcacgggcgtttcaccaaccacttgtatcagttctatgctcaaagaagtctgtgctccgtgacccatttggcttgaatttggcccggtagacgtccaatcagaggggttggctggatgaactcaggtcaaggggtcttagtgcagcgcttgcctgcagctgaccgagtccggagggtttggagaacttccaaatcacagagatggtgtgctcgttctctaagtgactggtggatgtggagtattggtgtttaaagtccttcatctcagactccaccgtgaaaaatgtgtggagtggagtgagccccgctagggccttatcatgtcatatggtatgcgaggtactgcatgtcgtgtagtgctgtgaaccttggaattgcgccttgatcatgtattgctttcactcgacaaggccattctggtattttgcgtccttgaaaggttccaaacaacacgtgatgtggtgacacacaaccatagctccgcaatcgcttggcccgttacagataagccgctcaggctctataaggaaggagcagaagcttcaatagtattgtgttgcgtttagaacacatcaatttaaaagtaaagtctcgggttattgtgtgacagctcctccgctttgctcgaccctgcagatgcattggcatccaccgagatacccacagcatcctcgacgctagttattccgtctcgggaactacctggagatggcattattgattcaggccccaccgcgacttggtctccaaaatatgcctgcgaagctatcaccccagggtggggctgatgagcatcgtacgaactcaccgaactgaccctgttgtccttttgccatgcgtatgaaactagtccggaatgaggctgatctcccgagggctgtgatttatcatggctaggagtcataggaaccgcgtagccacgtcccggtgtgtctgaaacgacgtcacttgattgctcaatggtaaaacggtccgacatgaccgtcagccaacgctccatatcgggcgattctcggaggggaagctgagaccactctttcatgcgagctgccttgtgcttgagcaaagtatccgtctttggggtttgaatcactattggttgccccattgaacgcatggccatcaaagctccgtaaagggccgactcggtctctgccagcctctcttccaattggttcaagtatcccaacggtaagcccctgggccaatgagttagcttcccgggtacctgcatacatgtaggccgggtacttgccttttaccactctcagggtagatgcatttcgatacatctcctgcgcattgggaacagaacggacttaacgagatacaagtaattagaaatgagactggctagagaactaaacggtgagagctttggtcttacagtttgcggtcacactatatggtcagcacttatcttgctgtactttatgaataacatactttgcatttgcgctgtctgcatagctcacaggaaatcggattcaagttctcttctgatgagatctagagtcagtcgatctatgcttcttatctggggtattccggtcacacctggcatggtggcatcaggggccttccgcttcgatcgcaattgcgccatttgttaatcccgggattatgcaatgcccatgtagagcccccgaacatactaatgcaagatcaggctatcaaggtcgggtgtactccgtatgtatgttgctgttgggtgaaagtctcggagtaagaaacctccgggtaggattagcaggcacgtgatgatcaccatattcatcaggaagacaactaatacaacagttgttaaggggcgtgcggagcattgattttgcttctgttttgaatgaacgaattctatcatcgtgttgttcaaaatccctgcaaattggtcgtcataacgcatccgattgttggtcttattgacttgattattccatcccttccttttttattgcaatttattaccagccttccttcagtctcttggctacctaaatatggcttgatgcataatttttttctcattctgtctcacgataagcttagcttgctcaaatgcatacgcacaggcaagaattcttcgctaagcctgcgtccagtaagggtaatgccatatctattgccaataccagtaaacagatactcggtatgttaaaggcagcttacagaatattggtggctttcatgaccattcccttaaatttcctgacgatttcacgatcagcagagaacccaagtggtacctggatgccttgtagtcttccaaggtcaaggggaaggtccgtggaagaagttacgagaagaacatcacaactatagttttgtgaaagacgcgtgttaccatggcctaggtgctccattcgtgccttcaaggagaggaattcctcagatctagacgtcccttgtgcatcacgcgcatagtgcactcataattgagaatgtagctttaaattgttcgactcgtaggagtgagatagcactatctagggtgtatcctctgtgctcgataggggatggcgatgaagcagttaatataaaaaaaatattgttcaatcaatcttcaattcttcgattttatagatctggtgcagcccgctgctgacgtaataacgaactgggcgccagccctggagacttctcccaaaacttgacttcaatatctcatccaaaaaatgtgatacacaaactacagcaataatggcttcggcttcacctgcgagtatgagattcgaggacaatgaggctgaatggccatatttttctcgtgcaactaagagacacaagcgcacatcaggcgcgggtacctcagggccctcgcctcgcgagattggatttatgagagaatctcaaaatgacggatctgcgaccttccttggaagctcaagtggaatccattttatccgccatgtctacaatgccttcgcacgtcgttcagcggacttggaccaaacgcgagcccgtgataaaacctcggtgccaggggaagacgaccggctacagcaaaatccaggaagcattcagagctcggatgagctgtgggcgatagaagaactaaattttgtgcccaatgcctcattttctttcgacgatcttgtcatgtggacacgcagctatttcgaaaattggcatccaatcttcccatgcctccacgccccgactgtcttgaaaactatagagacagtcagtcaaaaaggagcggagtcggtcaaccgattggaattgatgattctccgctccatcgtatccatttctctgggtgacaatcgacagagaacgtcgtctgaatcgaagcttagccccgttccttcggtcttggtctttcgatccattcaacatgtgatgcaagatgtacaaagcctccttgaagagccgactagcttgccactgctacaagctgcatttaccgctcaacttgcacttgcttctcttttgcgcctgaatgccgcctcgcgggtggggggtgtcatcacccgcactgcattccacctcgggttgcatcgttgcccaagacgcttttcttgctttaccagcgaagaagctgatattcgttgtcgattgttctggtccatctattcccttgaaagatatctttctcaggcccttggcattccgctctctattcgagatgacgacatcgacgtgtgctatcccgatgccgaaagacattcttcaacaactgtcaagctcccagatggccacagactgcggttgttgtgccaccttgcgagattcgcacggattcgaggtttgattgttgaacttcgtaataaatccattctccatagtcatgctagccaggtcgaagcggctcatgttactggagagctagcacaatggtggaatgaagtttatgatgatgtcaatcccatcaatgagcccgcagaatttctagagcaagagccgatcttgcagccatatcatcggctactcctgatgatcctaagacacgaagctgtcatttcgctgaaccgacctcttttagcctctgaaaagcccagtgcagattacaagaacgctttgcagacttgcattggatcctctcggtctatacttgcggcattgagaaagcacatgtcttttgaacccaaatctccgctctcgtggccatgctttacatggtcgacttggatggcctgtcttattctgatgtatgctgcgtgggaagaggaattatctacgccgactgctctcaaatatgcgagaatggggattgccatcttggaaaacctatcattgcgcggtagcagctggccggagacctgcatcgaggcgatcaagggtatggaatctgcttttgagacacaaacaaatggtggtcaatccgccaaggctgctgccaccttgaacggcgccgagagaccaactcaaccctgtgcccaagccacgtcatcgatggatgaacagatagcaacgccgccggttcgggatggaaataatgaggttggcgatacagatctcacgccagttcgacctcaagctttagcaccgaatggataccaaggccgttcagtctctaccggaattcatccgtttcaaccatcaattcgctcacctgtccagagacttgacactgcagaaaactacgactctactgttttctcacagtctgacaatatcggtaaccttgccggagggttagaccctgctgagaacgatttcaacggacaatattcagctggtctcattttcggcaacatggctgacggaaaccctgctttcaatccgagttttgctggtcaagactctttgccattttcatcatctatgcttttgaacgatttatggagtgtggccgatggcccatggatgattcacaataactttttgtgatttccgatattttcataagcgagcatatgcgtagatctcgtaccttagggcaatttcaatgtgattaaggattgaaatttgtttcgagcaatgaatctggaggccatctacaggccatctctcgaccaagttgttcgtcaagcggacatgtctttctccgagtggggccgtatagcacatcccggacattcgcatctccgtccgcaccccgcgacaattatagtcgaatgagctcgcgatgaggggctacgcgataggtttatgggcagtttgcaggtggagactgaaatccgggaatttggtgccgacttcctttaaaggcttcgtcttctgccgtttatcacctaaatcacctccaacaagaacttatttatcataacatcatgtctccaccagtcgctagtcaaaagacctacagcatcgcatccatcccagccgatggaattggcccagaggttatcagtgctggtatcacagctctgaatgccttgaccgatactctcaagacgttcaagttggagttcaagaactatgattggagctccgagacgtacaagaagaccggcaaatacatccccgatggtggactcgaggagctcaagaagcacgacgcgattttcttcggcgccgtcggcgctcctggtaagcagacacaatcaatgccttggagacattatactaaacaccagagaagacgtcccggatcatatttccttgtgggggctgagactcgccatctgccagccgttccagcagtatgcgaacgtgcgcccaacacgggtattccgcggcaccgagtctccgttgcgcaagtgcgggcccaatgaccttgactgggtgatcatccgtgagaacagcgagggagagtatgcgggccagggtggccgttctcacaccggaaaaccgtgggaggtcgcgactgaagtttctatcttctcccgtcacggtgtggagaggattatgcggtttgcctttgagactgctcagaagcggccgcgcaagctgttgacggtggtcactaagagcaatgcccagcgcaacggtatggttctctgggatgaagtggcaaagattgttgcggttgatttccccgatgtcactgtggacaagatgcttgttgatgctatgactactcgcatggttctgaagcccgagagtctggataccatcgttgctaccaatttggtgagttgccgatatagaatgaggcatcaataggtctgtggactaacgatcaactagcacgctgatatcctctctgatctcgctgcctctctggctggatctattggtatcgcacctacctctaacctcgatcctacacgggagtatcctagtatgttcgagcccattcacggctccgcttttgatatcactggcatgggtatctccaaccccgtggctacgttctggacggcttcggagatgcttgcttggctcggcgaggaggaggctgctaagcagctgctggtctgtgtcgaaaatgtctgcgagcagggagttcttacccgtgatttgggtggtgacgccacgacgaagcaggtcactgatgcagttgtggcggagattaagaagcttgcggctcaataagtcgtgtccaatcacgaaattttgtttggggatgagcaatgaaattgtatagttgaataaaatgagtgggcaatacattgagacctagaagcggctacaatgatgaaaatggaaaatgcagaatgaggtgaaagattcaattcctataaaatgccttttgtatatataccccgtaacatttaagaggatacctcgcacttccgtgtatcctacaagggaaaccttcgatatatataatttgagtgtttgttgtgatcaccgatctcgaccgccttttaacctccatcaactcaaccatcactctcatagaaacatttgaatggagcacccgtccaaaagagccaaaatcttatcagattccgatgatggctcagcgagtacagccttgacgtctttgcaaaggaccattagcccaccattgccacgaggctgccccgaactgactgatgggaaattgacttctgacactggagacactggaggcactgctcgccctcccaagttggtcaattcgccagtacaacttacccatattcgagatctaccggatggtaacaatgtcgacaccatccgactacgtgatattctcggagatcccatgattcgcgaatgctggcagttcaattacctctttgatgtggattttctcatgtcgcagctcgacgaggatgtccgcagtctggtgcaagtcaaggttgtgcatggatcgtggcgaagggaggatacgaatcggattcgaattgaagtaagtttgcactgacgtgacttgatcgggttggctttgtcttttgaatacgtctcaccattgatcgagggtttgaagtgacgactaatctgcttctaggaggcctgttcgcgatatcctaatgttgagcctattgtggcctacatgccggagcctttcgggacacatcattccaagatgatgattcttcttcggcatgatgacctagctcagtaagattcttgcatacatttttgatcgctatagcccgatataggtctgactgaattaccaaacagagttatcattcacacggcaaacatgatccatatggattggactaatatgacacaagccgcctggcgctccccattgcttcccctgcagaagacaagctcagcaggatctcagacagacaccaaaattggctcgggcgcacggttcaaaagggatctcctcacttatctgaaagcgtatggacctaaaaagaccggcccgctggtccagcagttggatagctacgacttcggctctattcgcgccgccctcattgctagtgttccgtccaaaaagcacgtcagtgactccagctcagaagaggatacactatggggctggcctgctctgaaagacttaatgagccagatacccatccagcagaaaaacacaggcaagaaaccacacatagtaatccaggtgcgtatctccacaaaatcatcatgctgtaataaatctccaacatatccaagatctcttcagtagcaaccctcggccaaacaaaaaaatggctcaaagacgtgttcttcaaagccctcaccccaacccaaacccccaaaccaacaacctactcaataatcttcccaaccccagacgaaatccgccgctccttagacggttacaactccggcggctcaatccacatgaaaacccaaagcgcaacacaacaaaagcaactccaatacatgcgtccgcatctctgccaatgggcaggtgacaccctcgccccaggccaatgcgtcgatctatccgaagacaatcccccaacgcgcgaagcaggccgcgcccgcgcagccccgcacatcaagacttacatccgctttggggactcggacatgaagaccatcgactgggcgatggtgtcatcggcgaatctgtctacgcaggcgtggggcgcggcgacgaatgcgagtggcgaggtgcgcatttgtagctgggagattggcgttgttatttggccggatcttttccgagatgggggttgtggcgatgctgcatctgcatctgaatcccgagcggaagagaaatccccgatgccagacacgctgatggttccttgctttaggcgagattgtccttctgtgtctgagggcgccgagacggcttcggtggtcgtcgggttccggatgccttatgatctgccattgacgccgtatggtgcgggtgatgagccgtggtgcgcgactgcttcgcatgctctaccggactggcgaggggagagttggattgcttgagtccgctgtctttgcatttagtcttcttagctatattttggtgcattttcgtctcagcagttcacgggtgtgaggcgcatggttgtcgtagtatacagtgggcgggattgtgaggtactgatactgagtcatggaaagtagcatgcatttgtattcgtattcgtcctgaaaggtttgagacaatacgattatcttttctctttagataaccgtctttccaaattcactccacaacatatctccgatagatcgcgagtcattgtcccagactaattcttccaattgtatcatctattcgtcgcgggtgccgtacttggaaatgagggtgttgacgtggctgatgtagagttggtgggccttagcagggctgtaatccttgaccttctcccaagcaccgtagagctgcttcttctataaggttgcaaagagtgaattgtcagctattggccttctcccaaacgtgctatagtccggggcttcccgagctcaatcaaaagcagagcttagacgtacctggatatcgaacatgccaggcttctccataacgtcacccttgccaaccttgaagtagatatagaggtccttcttctccagaagaccgggggaggtcttcagcatcataacagccttggcggcgaactcgaaggccttgcggagggtctcggcctcggcggcatcatcgagcttctcgaactcgccttggtcggcgaccttctcgtagacttccttcagggctgcgatgtcgatgccggcggcagcttcttggacctcgggggtgaacttttctttcttctgggcagcctccagggcggtgatgaagggggtgatgtcggacattttgggtttgaggattgtttgtttttgggtataaggaggggtaaagtcaggaacagaggatttatatggttgggatgttggagatggttgagggcggggtcaacggccctggaggtggggtggatgacacactcgccagttgattttgaggtcatacgacctcttgcatacaatgcctttactattacgtaggctatggaatgagaaggatagctttagagtaatccaggtttgtcttaacatattcaacatttggttcagaaattccattattgaccacgccgacagatgcatatccacaatgcaaccgctgtggaatcattcgctatgcaccagaaaaagataacaaaagagaaatgtccgggcaatgtacaagttcaaagatgaagagcgatcaccaatccaccgcccatccattgtgggtgaggaattcctcacaaactgccttgagggcatagttgttccgcagatcattgacactgataggagcccgagtcaaaggatcgacgcccgacttctcgacatacttggtgatgcccaagcgatcgaaactgaccccggacggtgtaatgacaggatcatgcatgatctcaaatgtgatgccatcaatgagatagtccggaacaacctggaagcaaacccaaacgtcaacaaccacctcatcgaagaaccaagttcaaaacctaccctttcctgaacctctcccttggaagcaactcgaaatgcctccctcaaatgcctaactttagtctccgcatcctcccgcagcgccttctggtcctccccgaacccaatctccccgatctccccgcgctccaagcgaccctgcaactccgccagcgcccgcgtcacatcggcctcaatgagcgcctccatagaacccagtgtctcattcagctggcgcacccgggaagtctcccgcgcagcccagatctgctgcttcgcgcgcaggaccgtctgcgacagattctctgattgggcattcttcgctgctagactctgttggtaagcttcggacgcgacgtcgagtgcttcttgtgggcgctggaggcctaggagtgcctgtgcgaggtagtagtagctcttgagcgcgacggggttcttgagaccgtagatctcgattgcggctcgcgcgtcatgttcaacgtcggcccatttggcaagtttgcttcgtgttatcgcgcggtttgtgaagaaggttgggtcactggggttcttttggattctgtttaatgaggggattttgttagtttggggacatttgaatgatcgttgggtttgcgactttggttgggagtgaggggaagtgttggaggggttaaatgtgatagcttacgcctgggagtacaagtcttcggcaccgctgtaatccccagatttgtagagctcattgccctttgctttgagttcttgggccatgatctatgtgtgagtgaggccttgagtttctccccgtgtgatctgttccccaatgtggggcggtccccatataaattcaagagtgatcggagtggatattgctgtgattcatgacagctgggggatttaaagggtcttggatctgcagtaactatgtaagtacccttttgaatatctttgtgagttcacccaaagcgcatgaaacaactgtcactatagttggttatggtctatggaaagtcatagatccccgcagaaggtctgagtcagctcaattgatgcactgcgccacatgaggtagctactattctatacgttaatctggatgaggttgactatacttattcattcactatatacatatctctgtgaccttctaatctgatttggaagcagaagtaacattcggttcgtggtatcatacgctgtgagaactaagaaagacacaacaatcctgcagacaagtcagtgcaatctgacaagtcatgctttgtcaaagatggcacaagactagaaggattcccaagacatccggagtgtttcgggtatcaggtaagacgagacaaacagcaaagacgtgtctaagcagcagtatggaactggatctcatagtccgtgatagcttggaccttggcagcagaggcggacttagggtcgaagcggtagtttagccagtcggtagccagcttcttggctaattcaacaccgatgacacgctgtcccatgcataggacttgagcgtcgttgctcaggatggagcgctcaacggagaaaggatcgtgggcagtcacagcccgaatgccgggcaccttgttcgcggcgatggcaacacccagaccagttccgcaaatgaagaggccacgatcagccttgccatccatgatgagcttggcaccctcgacggcagggtgtgggtaggcagtcttgtcggaggatgagttgacacccacatcaatgatctcggcgacgagagggttcttctcgagagtggccttgatagcatccttatatgggacaccggcctcatcgcaggccatgacgatgcggaaaggagtagacatgatgaggaccgaggtatggacgagaggatgaagaatgtacaaacaatacgagatgtattgaatcaaatatatggtagagataaatagattgatttcacacagaaaagaaatccttgacttgggagtacaacaaggggtctttatatctttttgcttagctctcttcccctctctcctttatagccgtacaaccaccgctcaggtccagccaatccttgcatttgatagaatcacctacagccgttctccaccaagagactcgaatagtctggttccggccttgatattgttacgcgtatttcagcgtccagggtggcccgccccagcatcatagcaccccacgacgggccgtgagtggtcggtgccagaaagaggttaaaccgaggtcggatactttaggatccttgttttggtccgtacatgcgtcttacctcgtattaccggcatgttttattagacctcgctggcgctggcttggaacacacaggcttcacattctgccacacaccaagccatcgatgttagtggtgagcgcaacctacaatacacgactgacaagaaggttgtggcttttcgcacaggcatggcggtccaactggcttcttaaatgctgatgcctcaaggccgagggccgggacctttggtttcatcttttcccgagtccagggttattttggtggctaaggtctgggcacctcgtatatcgacgaatacatggctatggccccggccgatgtcacctagacgggaagaggggaatattgaattgacctcataccagggaattaggttcaatgctttgaaaacctggctgagcatgacattggagggtaatgcgggatatcgacgagtgaatttgcctcctgacttagtcttccaatggtcgaatgcacaagtacacaagtacggccttattatccccaagacgctaaaccccataattgatgtgcattgcctcatagcaaaggtgttttactccactttaccactccactgcaatgttgttggtcgttagcccaccggttctccggcttgtactattgtacaatgtatgttctccggattttcgtttggatctgcactgtatgatcctagaacttgcatcctaattatactatagtaggcagatgggatgaaggagtcttggtatgtatgtctaaagtgtacatacgtccaaagcgcaataccatctgggaatagtttgattctcctatgtccggggtacggggtactagatattacgttggcttcgcttggcctatcacagtctagccaacaattattggattcggtattgagtactctattgagtactctgaatggctatagcccgggcccatgtgacatcacgcactccgtaccctcatacaacataacgtgtactccgtatggacaatcggaacgtctagcgcataaatgccactaatgcgcattgacacactggaaattacctttgatcaaataaatacttggaaatacttggaattacaattcgaaccctggctttgactttccaactttccgagaatcaagaatccctagcctcagacgggaacggtcccccctccataacacccaaacacacaactttcgcaacaccaatcaccatggcgtccacttacccagttctcccggagaagctcctcctcatctctctaaagatgtacttcaccccagaccgcacactcacctaccttcgcgaactcctcaacccaaccaacaagatcgtccaccccgcaaaccgagacaaactcctcctagctctaatcccagacttcctaaccatctggccctgcgcgcaaatcctcaaagagtacgaagccaacctcaccagcaccggaaccggaacctccccatccccaccccccttcctcctcggcgcgcaagactgcttctgggaatcgcaaggcgcatacacaggcgaagtctctccggcctcaatccgcgcgctaggctgctcaatcgtcgaactaggccacgccgagcgccgcgccatcttcaacgaaacagaagaccaaaccgcccgcaaagcagccgcaacctgcgcccagcacatggtcccgctcgtctgcatcggcgaagtgacagctcccggccccgtcgcctcccaagccgtcggccaggctgtggccgagtgtgcggtgctggtgcgcactgtgctggcggccatcccggacgacgcgcccgttatatttgcttacgagcctgtttgggctattggccagccgaagccggcgggtgttgatcacgttgctgctgttgtgcagggcatccgggcggttattagtgcccggtctggtacagtgcgtgttttgtatggcggtagtgccggacctggtctttggggggctggtgggcttggtcgcgcggttgatgggatgtttttgggcaggttcgcgcatcaaattgatggcgtgcgggaggttgtccgtgaggtagaggagacgctggctatagcgtgatgatgccccaggtactcatcctcgacacgacgccttgacatttcatgtctacaattatacaggtatacggtatcgtgtttcgcactatacggttccttgtcattgttatacggaataataaataacagaccttgaagaaaaaggcgcatctagacaaaaacaggtaaagtgggaatctcaaccggctgtctccccgggaagcctatctggggaaacccgcaaactggagaacttccccggttttcttcagtcacggggccgatcagagatttccctctcagatgactttaaagctttttttaggttcggcaaacctcaataggccttggatactatgtatctctcctccactctgctttatgtgggttcattggactgatcgagtaatccgagctattgatgtagttcgcgcgggtcaattccgagcgagatcgagttccccttttcatttatttcggtattgcctgacttggtcgttccatatagaattttgcggtgtcaattggatctttcgggcgagaaatcagaaaaaatgaatgcagaatattacttttcttgtgcatatccgtgttatttacaggatctatcaaagaccgaatgagaataatcgaaaaaaaatcatagttcacaccgcttatttcttctgcagctcctcgcgcagctcctgcttgacacgcgtgacagtgccaacaccgccgtagacaataccagtgtacatcatagccaccgaagcgccggccttgagagcctcgcgtgcctcctcaccagtagtgataccgccggaagcgaagataaccttccgaggaaggccagacaccttcccgacagacttatccgaatcggtcgcagatgatgggggtccctggtcaagcagggcgcggtagcgggcgacgagcgcaatggagcggttaaacagctgggggccggagtaaccgccggtttccttcagagtcttctgctcctcggcggggaggacgaagccccggggcacggggtcgggccgacggttggtggtgttgccgacgatgacaccgtcgacgccggagttccagacagcctcgcagatgccggatatctgctcgtcggagtcttcatccgggcttaccttgaccattacgtagggcttggtcttgcgctcgacgttcttggcggaggcgacgaccgccgtgaggattgctgtgaggggtgcggctgcttggaggtcacgcagacctggggtgttggggctggagacgttcacgacgagaatgtcggcgtacggcgccactcggtccacgcagtaaacgtagtcgcgcttgatggcttcgatgtctccgtcgggggtaaccttgttcttggcaacttgcaccgcaagaagtttgcctgggaccagacttccgggcggaacgttggcttcgccgtccaagacgcgctgcgcggattgttcgtgcaggccaaatccggcggcgtaggcgaagtcagctacacgctgcttcagaacctttgccatatggtcggcgcccttggagttgaggccgtagcggttgatcatcgcgtgttgcgagggcagtcggaatactctaggcttcgggttgccttcctgtggtagaggggtcgtgccgcccacctcgacgatggcaggaccaatgtcgaacagcgcatcagggacctcggcgtgcttgtccagaccggcggagataccgatggggttagagagggtgtatccaaagacctggtaaaagacctcgtcagtgattgaccatcggcaggtttgggaataccattacctcagttgccaggacaccatcactgtccgggtcgccacgctcgcgtgggtgcagaccatattggtagagcatcttcaggttttccacgccaacgtggtgcgcatcctccgcatcgggccacaaaaggcggatcaagggtacaacgccgtatctgtggatactggctctggtgtccgttccatagatgtagcccaccagcagggttaaggccaatgaggcaccgtacaaagccttcctagagccacggcgggctttgcgggggatctccttagcggcctcctgcgtaacttcctttcccatctccttggccgcctcagtgggtggaggtgcagccgagtccgaagcatatcgcaaagcaccggggtagcgctgggcccgtttcggtagcaatgccgacggccgttggatcaagcgggaggtagggagagcgcgagcccggacgctggctctccaggccattgttgcagagttacaagtcattttggttgcgtatagagctaattatcttcgccggagcaacgcccgatcgaacctatacagcggttagtacttgcgattgatagtggattgtggatagagctagtcaagctctaatcgacccgcattgtaaactagccggctggaacagtacgtacagataaatatgcacctaataaagcacttacaatttcaattgagcacgatccgaggttctcgcttgcagggcggattcgggttctttgctgcacagtccgggcggtgtcaataggtcctgcagaattttgagggcggtaccattacgtagcttcatcgctggatgtacttcgtcttctatgtcttcggttataatttcaataattgttagagattacaagatgcttcgaaatattttcttatccctatatttagagcaatgtctatgctttatatgcagaatgagtgaatatattaactgacgatcttcccttcaatgatcacgaggacctcgtatcgggcaacagtgctaaggcttgggaatgaccaacctaacttctgcatctcaaatgttgcgaatcctttagcttgtctctttctccgaacagaaacccttcgttcatatccacggtgctgcatgccacctgtcccagccaaaatgaggatccaaggaagaacaaccaactctccagcggggggatctggccgtgtctatttcgacgaggaggacgattcccctggtcgagaacatgcaccctcgcagcgggagtcgaatactatccccgaagcgactcctcagctcaatcttacaaaggagccctaccgttcattcaacgtcttcaaagatgtatgttagcattccggtatggatgcagctgtctctatataatccatcataattcaaacaattctcatcaattcgcacaggtaccactcggtacaaatgccttcagcttttgccttcaggtccacccttctggaggacttgctcaatctccaagcccagtatatcacaccttgcgcatcccctggtaccgccaagggctttatctgccagcttcatttgatctttactctggtggcaatgttgtgcgcagccggaaagatccatctcctgatcctaaggaccaccgtgcgcacattcactaccgtggctttgagggtctgctcggtcttcacgtgacagtagacatcttccgccaagtaggctctaacacactccaaaacgacctcccagcctctgaggagagactggatcttgtcaagcactgctcagtggatattgttcggaagggaattggtaggacttaccgtgttgagattactggtggcggcgctgtcagaacattctactggaaaggatccaagactgcattgtctctccttcaaactgaagagaaagacgctggtcctagcgatgggaacggcaacctgaagttcttcgctgcaaataaaccagatgatattcttgcggtgtggcagaatagaaccgatcggcaaattctagggtctttgaacgttatcgccgagcttgatgctgattcggatgggatccttgaagggtcaatggtgagttgcctggcagtggttgttgcagaaagggtttccgggcgagggtggataggtggcctggggaagtcaaggaactcttagaaaattgttatttattgggataagtgtatctccatgtagtgaagacctaaataaaggcctaaaactcgatcaccttgtaattagcaaacaatgaacttaggtatgctgagatatcatgcgtttataaacttccatttccttgagtttcttcattctgtcaaagctatttttgttagcctctctaattaccatgtcgatccaacgaatacgctgtatttaagtagaagtgataatatgttcttcactgtcaagacagatattttagaacatcaacatatgccagcccaaagtgagctatgataccccgtacctattgggggattctcaagaccaccctgccatcaatctccgagcgctccagacggtccaaaacctcattgatatcgtccaagttgaagatgtcaatatgcgcctttacatcgccggctacggccatagccagcatctcatccatctcatccgctgttcctgcagagtttccgacaatagtaaggcctgtattaattggtcagaccggctcatgtcttgagttgcataggtattgagaactcacccttgacaatcatatcgaatggcgtagctggcagtttgaatggtttgttgggaataccaacgcagaccagcgtaccaaaaggacgcaacatctgcatactttgttcgtatgctcgctcgccattggcagtacagatcacagcatgtacaccgaatgtcgtcttgtctttgactgcctggacaatgtcgatatcgcggtagtccaggaattctgtagccccaagcgaaaggcacagttgcttcttcttatctccgctttggaagcatcgggttagcttgttgtaaatatgacacataatgttaagttgatatcacatacctgtcgattgcaatgaccttgaggcccttcttagcggcaatctgaattcccctgcaagaaatatcctcgtcagaaaaaaaaaacatttcggctatagaaatctgaattgggaatgtacatatgaccaaggccacctccagcaccaaggatggcaaggtagtctcccgggcgagtcttggtcttcatgattgaagagtacatcgcaattccagctggagacaatgattagcgtttgtattagcgaaataccaattggcaaaacattaccacatagaagaggcgcggcagtatctggcgaaagctggtccggaattttcgtcacatgaagtgctgggctgacaatatattctgaggcatggtatcagaagtgccccaatggactgggtgatggcatcgatagatagaatacttacgctggaatgttccaggtacattctgtaaaccaccaatgcaattagtaacagaaccgatggcgaaagacatagtctgtggtgatcagcaacttactgcaccagcattcttctgatacgggcatacggtatggttgacttcacaaatctcgcactggcggcaagaactgtagagccatctaatagtggaaatgcctttagcgtcaatataactccagatgagaaatttgcgacgaaggagacagacctgataccaaccctcgttcccatccattgcttctcgtcaacttccggtccgactaagggtaatgacgaatattagtatacgttctgacctatgatcagagacagtgatagttcttaccttggactactctcccaatgccttcatggcccgcaacatcagtcaacataggcgtgtcaccgcggatgctgtgaagatccgagtgacataccccagaatactcgagcttgacgaggatttcgccttctcccggagttggcaccgggcgattgctcttgatccccacctttgtggagacaggagtacttgtggatgagataacagcagcgatctgaattggggggattggggggaccgacatcttgctgcttctatgaatcttcgagatcgcgtattggagaaagtctgaatctcaacgaggacacttggcttaaatacttcggtagttgaaacctgattccgataggcggcattagtcgtatcgcagatgcgggggcgtgaggaaggcgcaaagataagcagaaacagttagcagatgccaagatatgatattggagatctcgagtttgggcagattaggcaggttagaccgggggtgaaggtggagatgggagatatcaacacaataatccactacaaactcggatagaatacatctgacacttcttttttacagttcagcgtcaataattcaattaaacaattatgtgtaagccgcaagtctgacatcgggacaatcatgaaggaatataagacaaggactccgctaggcagagacgaaggaaagaagtgctacagcactcatgcagcagaaggcttccgagttgcgagaactcgaacaccaaggtatcaaagatgaaattctaaacccgacatagaacgctagaaaatcatgcattctcggactggattgtttgctgcaagtaaagacatagttagtttgagaaacaagcaggttgcatcgggagagaaaccaaccactagccaatccattccctcattaatacccttgccatcaatggcagagcaagcaacaatactccagtttcggtctcgcagctctcccagcttcaaagcctctgagatctcgcctgcgcccttggcaccgggctgatcttgtttgttggcaaacaccagcaatgcagcgtcgtgaagttcctcctcattcaacatggctgctaattcatctgccgcagtccctaatcgctcaatatctgtggagtcgatgacgaagaccactgcggcggtgttggcgtagtagcatcgccagtatgggcggatagaagtttggccaccaagatcctacaatccagggatgttagttatggcccgaacgagcttaaagagggttacaacatacccagacattcagattgagattcttatatgtgaccgattcgacgttgaaaccgattgtaggtatcgtagtgacaacctcaccgatctgtgggcacgaggtgtcagccccgcgaatctcacttgaacgcgccagaaaacccaagtttcaaagctataatatcttaccttgagtctgtacagcaaagtagtctttccagcgttatcctaaatacccgaaagatgttgattagtttcggtccttgtgtcactaatgagatcctgcattccccgcgtgggatgcagatgaggcacaacgtacaagtcctagaatcaggatgcgaatctcttttgtggaccagagtagggaccagatacgtgatagtgaacctcccatcgtgtgtaagattaaccagtgggcgcgttgttcactgttcggtgcacagggtgtccgggcaagtatgggccgagggtggtttaggttgaggggcgcgtaaatggtatagattgagtggaatgagacaaactcgctatggtggtatggtacaagtagttgagatagagatgaaagagaagaaaggcactgatggcagccgcattggatgttcttggccgatgggccagtgcggtgtgggcggtcaatcgggggatcatcgtcttgcgggattgagcttctcatttagaaaaccacattgtgtcttttcctctatcatattctggtcttgcttactttatcgcgttctacgcgactatccctcactatctgaagtgcaaccgggccactacaatcacctccggcgcactccctagatctgccgcgattagtttcaattgaagacagccgaccaccacccgataccaccatggttggaaagaagtcaggcaaggccctccgggatgagggtaagatagtccggtcgagctgttggaatacagccatcaagaacagagcagctgatacttgacataggcctggagcggaccgacaataacatggaactatccagctggccgcagattccggcaatcaatcagaagaactactatacgtacgtatctaggctgatgcctgccgcacggctctatttgataacatcaatactgattgcgctatgtagggactacctgaaacgagacgatcaaaatctcgcgttccgactacaaaacgaggaagcaaggacaaagatgacgaagaaagcgaaggatcacgaccgtgccctggcaatggccaagaccgagaccgagaccgcggaaggcgagggtgaggcagatggcgacgcccaaatggaggatgcggaggagaccccggccgagatggctggctctaaggttattgtcatccacatgggcagtcagaacctccgtattggacttgccagcgacgcactgccgaagaccttgccaatggtgattgcgaggaaatcggcgaccaacgagtccgaagaccatgatgaacctaagcccaagagattcaaacacgacgatggctctgaaatggagcccgaaaaggcctttggacctgaagtatgtccagtacaacttgtcgagatggccttgtactaattttttttgatagtggtcgtctcatttcaatcagatgtctgcggatttaaaggtgcacatgcgacagaacaagcgaagaatgcttccaaactccaaggagatggttgtcaactataaccgcagaaccgtgccagaaattatctctgaacacaatgatccaatgcgtgctgaatggaccgagctctctaatcccccaccagagtatattgtcgggaagccggctctgcgggttccggattcttcgaaacctcgttacaagctgtattggccaatccggaatggctggtgcaacgagaaggactacacaagcaagaggtctctcttcctggatatttcattgatcgtggaggatgcgatcaagaatcaactgcgcttgacgagcaagaaggattggacccagtattcgtgtgttttcgtcatcccggatctttacgacaagtcttatgttacccaagtcttggatatgttgatgcgagagtttgcgttcgctcgggtgtgtttcatccaagaaagcctggcagccacctttggtgcaggcttcacctcgggatgtgtcgtcgatatcggagcgcagaagacttcaatctgctgtgtggaagaaggcatgtgcatcgagaactctcgagtgaaccttaagtatggcggtcaagacgtgaccgaaacgttcatcaagatgatgctgtacgatcatttcccctatgccgatatcaacctacggcgtagacatgacttccttctggccgaagagctcaaaaagaagatctgcaccatgaacgaagccagcgtttctccacaagtctttgacttccaccttcgtgtggcaggccaggatacgcgaaagtacactttcaaggcttttgacgaggttcttcttgccccaatgggtgtatttgagcctgctatttttgataactttgacaaaatcaccgggagacggaccctgatcgatcgttctgttgacatttatgatggatcacctaatgatcctacttctgcagcccagtcggagattttgaccgccatggcccctccccttccccgcggcaagacgaatggcgagtctcacttggcggtgccggatgttcaggccacaccaagccgcccccacgctttaagcaaactcgagggcacacctcgatcttctgtcgctggttctccaggaccggaaaatataggaacccctcaagcaggagggacaagcacgcccgctgccacagccgctgtagcccaagctccccgccctcctgccgtggaagatcgagatgatattatgcctgtcttcggtctggacaacgctatcctgacctccattgcccacgccgctcgctcagacgagaaaaagatgcgggatttcatcggcggtatcatggtcgtcggtggaggcagcttgactagcgggttccatctcttcttggaagagcgactgcaggctctccgccctggcttctcaaaggagatcatgatcgggacaccgcccagagatctcgatccccaggttgttgtgtggaagggagccagtattttcggcaaactaagcggtacaaacgacagttggatcggaaggttggagtatgatcgacttggtccccggctgatggcgtacaagtgcatgtgggcgtactgagcacttcgggatattcatttatggtattatgagaattcggcgtgggagttgcatgttttgtggtcactttcaaaaggaatttctatattttttctaatacaatggagtactttgaatctcgcaatcgataattagttgacctaaaagaaagagctgtgtagttgtgagctgttgtcctgaggttgggtaaatgcacgcacttatctgcttccaacactttcatctccatgatttatgtcctttcacgtgatatcttctgtatttccacgcgtatattcccacaacgcaataaacagacggtgaatccgggcagaataatggttctcaggctcagctccggggttgctctgtatggcttttgccgattcctccagttccatttttggccagtttggatagccccttctactggcgagccgaaccactggattctgatatattgccaattttgctttctaccgccgtccttgcctttctacaagcccttgactttcctcacggtaggtttgcgaccaattccctcacatccattttgaatcgagctcttatactaactggccactatagagttgcactaccattttcgctcgccaaaatcaaggcgacaacatcctaattcatcctagtccattcaagtccattccagtccattacggtaagcttccgtcccacctagtccatgcggtacgccgagttgctaatgcgcaaaatcacccagccaatcgcgtgaccaaataagacgacagtatgtcttccaaatcaaaggagggtcagtcctcagggggctttcatcaggaatacattgcgtccctccgctatcgcaatgatctccctcccccggacatgccccccaagttccttgacatcccacacgagggcttgaatcgcttcctcacccccgggtttgcctcaaacctggcacgccgtgaggagcctaacattgaagtcgatgccgaaggtggaatgccaattgatctagtcggtattccggggttacatttgggcgacgagagtggtatgtcaatgcagaatcccctatcattgcgttgctgcaactaacatatccaccagctattatggcaccagagaaccctcagcccatggatcccgctgaccttccccttctcacgactattgagcaactccgaaaccctgcccctaggaataccaatgtcagtttcctccgccgtacgcaacatatcggtgtcgaccgcagtggcggagatggatctcgccctgcacctattaaaacacaaccgcgcattgcgaagaaaggaaagcctcctgtggatgacccgaaacatgttaagaagttcattcaaaaaggattcgatatcgcctaccccaagagcaagcacgtcggagaggacactgatagccacatccgtggtcttccacccacaaaggcagaacttgatgcctgggctaatcccgtccaccctgacaacccgaagctgaagccagtcgggttcttccctgtgatgcctgatctggaagggttcccagaccctggtggttaccttcaattcaagtttgataaggcgcctttaacagccgtcggaggcaagcgggataaacgtatggatgttggtattctgacaccagtcgcgcccgagcagcgtatttgccaggagcatgaatccaagctgaatcttcacctcacgaaccctgttctttacgcccacccaggcccagttccttatgactaccaactcttccttccagagaagccacagtctgttaagaacattgacgcaagcatgaacctgtccaacccgaaccgagacagcgaagacctatacaccaatgagagcgccgagggcaccaaattccaccgttatgatcgcattcgcacttacgccaccagtgctcaggtcttcaacaccgatcaaaaggacattgcattgacgctcttcaagcccaaggatggagacaccaggcaactggccgcttactactatccaatctcaggcaaggcccgtctcaagccggagcgcgcccgcacgattgctcaggccggtctcgctcccacttccacccaacaagaagagaccgaggaacggattgaccagatgcaagtagttatgcgtgatcccaacgaggctgaaatctacaagcgtgccttgacccgtctgcgcgtcgatccaaagtttgcaagcaatatgccacccgagcccgttgcccaggaggaggagcaatcgttggataacggggagacagaaaagccagccgatgaggacactcgcatgagcgatgacgaatagtcattcgcagctttctatgatgtattatggatctattttttgaacattgcaatctccaaatttctgcctaggtagtttcccatgggtctggcgtctgagcaatggaaaatggcgttacgtatagtgaatttttttactaaagtagttatacaatcaatcgtctcatacattcgcgaatctagttttgtatatttgtatgtattaggccattcatcccaagcctcaattagtacgtgtcgccttccagtcccgtaagtttacgtcaatgtgatagaataagtcatttctccaagtaatgtactcttcgcgtactaagggaaaaagattagcctctatacaaggtcaggtctaagtgatgaacaaacaaaaggaccagccaagtcttacataatcatgccaaggtgattgctgactaataatacgggcagcctggaggtaactacgctgtacagaagtggccattctagtcctaagttctccccatctaacatgctaaaccgaaaatcctctctttctgaaatgtagtgcagctatatggtggtctgggtttccccactgtagtatgttcataaagtcttatccccccgtggtctcatttacaagatcccgcatagtagggcgtctcgcatatgggaaacaacatcttctcgttgaaaatagacaggggcatgcgaattcaacctggtctcaactatcccctagctaggcttgttcaaaatagcttttcttccgcagcttctttataataccactgactttattccagccttcagagatgatctggagatggccttcctccagagtcgagggtgtgtcgacaggtactcgcatgaaggccctagtgtgggttaaagactaaagtcttgttctaggagatcagagtggctcactgaatcaatgggtctctttgtgtcgcccacgtaacaatctggattgtaacctgccacgggcgagccgtaatagccgcttcccagtcgagagacccagcttcgacggtggagatggtctgctcttgtttcctaagcttggtcaacggtgttattactcctgagagatctttaacgcttacaccgggttgcctattgagtaaagttgaaatgacattgaaccatcgagttcgaatgattgcccaatcactctgatactgtcttttgatccatcttctagtgtgatttctggtgtgtccacgtggactaacaatcgtataaactgggttgaggtgtagaggccatccaaggtgagactcgcaccagctaatgaccgtcaggttacggaacagccctggtgtgttggaggattacgcaccaatctcttcgtttctcaacaggcccaacagaattcgaccaatgtatattgtttggagccccataaacgacggcgctgtgaggcgtggatctttcacgattgaaccaagcttgtcactttttatcacctcaaggcacggttcgcgtatcctctcctctcgctggtcttctgtctcgcttcgtatctcctttggatctaattgaacttgcccatggtagaggaccacagaaatgtctgccggtgtaagatattttatcacctgcctgtaatatgaagtggtggcccattccttactgaaaaaggcttccacttgtactccgggtaacattggtggcatttggtactggagactgcagatgaaactgatgtgtaatggaattcagtaataactaggaaagagcagcgaagagaaaaggagacagagggagcaggttggggaatttataataaaacggaagtaggcttcttcctaatgtgggtgtcaccgttcttcccctgcaagccaaagccatatggggctatgccctctctaccagggagtaaatattggttaaaccaatgagcagtagaagcgaattcagattggggatttttcactggcttgcaagggtgacggggccagcgaattacgcgctgggaatgcagctgcacttcagtactctcccgcagatcatggtttcttttttccccttctgcctcctcctttttcttcatttgttattgcgtacagctcacagaaaaactcccagtgagagggttgaatgatagaaaaggccagcctagtctcccgtacacctctgccgattcctccagcggaaaccatctcagggcgaggacgatacacaatcgaacgcttccgagctaccacatacccttcggcattagtgtgcacatttcctaacatcgagatccgacccgtggtagaaaggagccattcggagactatgccgagaaagctcgtggggtcttaactctcaagctagtcgtcaaaatgtcttgatgtatatgtatgtgactgtagatttcgaagggtcctcatagaaacaatagagagtatactggaatgtccgcagcattaatgctaatacatagacgcaagattatatctcatgaatcgtcgcaatctgttacatgttaccttgaccgtcatgattgaccagggttatccgactccagcgcttgttgcgtcctggttgttgcttcctgcataggcccatgagctagatttgctttttgaaggaggtcaaagcgaaaattgggaggattagacgaagctttacactcaaagttggtaagatatggtttatcccatatgtacagattactccaattacatgtgatagatagccttacgtatcatttcgatggaggggtgaaagaatagggaaaatgggatggaactctcccaaacccaagtccaacccatgaatgcctaacttatcacctgctcttcgacccctgtctcctaccccacccttggaatctacgcaaatggcaaacctcaatctctcaagttatcatcaacctatgttccttgtggcatcaaaccaaagctccttcgacacgttatcctgtttgccaagccgacttaccacgttatatttcacacaaaatcgttgcaaccccaacctatcaccacctagctgagttggagctactgctgttcaatacccttcttctcgagcaatgattctcactgatacttatagcaggtgtctatgctcgtatttgaactgactactacgacaataacgaaagaagtcttaccatcaccccctagtcttacgatcgacatctcctttcccgacattgcgatgaagtggttctcttctctgcgggcaatgatatttggagtacaaaggaacccgtggagtcttcaaaggacatttcagcgacggtctagtctgtaagggctatttttgcgtcaaccaaacgacgtctgcactatagttgtgtcgcagcctactcaaagctcaatgataaaatctcttcacctttacacatctcattgtatcaatccattttctttctctcatttcggagatcgtagatcagttgtgatctccgactcttgcacaacctttagattagtacttgaaattatcctgtacatgcttttcacccttgtatttacccaaatatgcgcctcatcttttgaggatctagtagcatgctcaagacaccagccattgacaattgggttgggtgatgtattggaggtacgcactcgagttccatcaattatattcctacacgcgaatagtgcggtgatagaagaagtcactatatgtacccttcgaaatatgtttttctatgccgactacctattgaagttgcgtccctagatataactctaaatggtggggccatagaggctcctaggctaaacctgaaagagcatattctttgggggctaaaataattgatctagtcatttcatgcttacaatttccttactgtaagttattctgcgagaacatcaggctcagaagtatggatatcccgtttttcgtgtaccgaaagtggtttcactcttcgtagattcatccagaccttttgatgatatgacggtgtatttaaacatatatgacgggggaatctccaagactaactgcttcgaggacacagccaagcagattttcctggatcttggatcgaactatgcatactcccaaacataggttcggacaattatgatcttgattaaacagcttatcttacaaatttcataggccattgagaaggggtgctgctatcatctataacggagcagaaatccttgtccagggtgactatccaggcctgattagggaagcatacatcgccacagacagtatctcatacttctatgtgatagacaattggtaaactagggctagtaactaactaaccagagattgatttagtcaattcatgtagcattcgtccatttgcatttttttgcggcattttagttgaactaaactcgatatagttactgttgtgtcgctcattcattcaactagatagccgctattggggtgttttagtactgataacttgtcattcattcgagtgagcatggtagtctcggtaatttctcgctggttcctgtctggtggtgtaagtaacataaatagagtaagaaaggccaatgtgaagtatggattcctaacacttttatatataactcgacccgagagagtttaagagttcggattgatttacaaactgaattgacacactaataatccgcatatgatcgcgagatgctccggtcctcgggatctatctaagcccttataataaaccgtggtgacactgagatcccatcaaacctggggaactcccagtgtgctagcaacccgggatctgattggcgcccgtgggccctgaagattggccctggtggcggccctatggggggcacggcatgccccacgggccaagtcgacgggacccaacgggcagtgccaagacttccagggaaccacatgggaggtgagtgggctgtgagtggcccagacatcgggggacgacgagctactgcaggaacccaattgcccttagagttggatcggagtggatttgcagtcaattgggtttggtcggtgctgctttcggatgatcgactgttcagtccaaatggctacagtggtccatgtacaagctactttcttcatgcccgttggtatacctgcaggtcatgtctagtgtaccttcgcttgcccctccactctctcttatcaatgcaccccccatgtgttgctgtgatagaacgtgctacacgttgccgtcttcccgtgggaggggtcaattagagccgattcgctttatatttcaatctctcggtcgcttctcttgctcttcgttgaatcgctctgaatattgaacatggattggatgcacgtctacattgtcggggcagccctactggtattcgccctagtcggcttagttcttctcgtctcctctcagcacatcaaggttgccaacactggtgctggaccttacttgaaattcatctgggcgaacttcctcaaaccccatgataagaaggctgggggccagcaagatgcgttggagagcttttacaagactcaggttcgatcgagtgtgtgcttcgatatggctctaagctgaccgtgttaggccgcaatttacgatgccactcgtcgtcgtctgctctgtggtcgagaggatatgcttggcctggtggctgcacagctgaagtacaaggtcggcaataaagaagtcaaggctggaaaggctgtctgggtggatgtaagtattggattgctattttccgagctagcgctaatcgattccaggtcggtggcggtactgggtaggcacgaaagaaaccccgaggtgatacagaacatctaactcgcgatagatacaacatcgaagccatggcggcctttcttccggtggacaagttcttcaaacatgtttatctggtcgacctctccccgtccctctgcgaagttgcccgcaaccgcttcgagcgtcttgggtggaagaacgttactgttctctgccaggatgcccggtcattccagcttcccgggaagaacttcgatttgcagtctacaaatgcagcaagtgatggcgtggacttgatcactatgagctacagtctctcaatgatccctggtgagtatttaagatccacgcaagactattgatattgactttttagactattacagcgtggtggactcattaacctcccgcctgaaatcaactggaatgttgggtgtgtgtgacttttacggtaagtaatacctcgaggcttagcatgaatgtcactcattcagtatagtccagagcattgtcgatgtgtcctgtcgcaactatactggcggcgctttcaaccgccatgtcaactggcttgggcgtgtattctggagagcctggtttgatttcgaccgggtcagtctggaagctgcccgccgagactatctggaatacaagtttggtactgtcatctctgccagcgaacgaaactatttcctcggtggtattccctactacatatttgtcggctgtccaaaggagatggcatctactccatcaagtcaatccattgagaggctggatgcatcttttactgaatctccttacctgcttcctgccaatcacaagcaggagatggataatgcagtggtgaaaagcacacatgagattcgctccaaagcatatgagtctgcggtgattaacctgagtgccaatctgcctctcccgtcgtccttttaccagaaccaccactatcgcatttattacaacgacatgctacccaaacatactcaattccagaacgaatatatctacgcgttcacatgggaagacccgcgagttgaccaccgcctcctgaacatcggtaaagacgacgtgatcctcgcgatcaccagcgctggtgacaacatccttgattatctgcaaaagagcccccgccgggtgcacgcagtggacttgaaccccaaccagaatcatcttctcgagctgaaggtcgcctcttattcagcgttaggccaccgggatatgtggaaaatcttcggtgatggcaagcacgcacagttccgcgaactgctaatctctaagcttagccctcacctgtccagccaggcattccagtactggctcgagcacacccagatcttcacctctacctctggccatggtctgtacgagaccggtggatctcgccacgccatccgtatggtgcgatggctcttcaatatcttcgggctccagggtgaagttcgcaagctgtgtgaagcgcagagtctcgcagagcagcgcgaaatatggcctcgtattcgacgtgtgctaatgagcagaccactccactgggctgttgtgagcaccgaatggtttgcctggaaggctgctggagtaccacgcaaccaaagaaatatgattgtcgacgacttcttccgccgcaacggcttgacggaagatatgaaaaatggaaaggacgtcagcggccaatcgatttgggaatatgttgtcaatactctcgaccctgtgatcaacgatactttgatcagcaacgataactatttctacttcctttgcgctcagggaaaattctcacgaaggttcgttttctcttatatatatctcgactacacgtgctaactgcaattacagatgccaccccacctatctctctcctcaagcacacgtcaggctttccacacctggtgcatttgatggccttcgcatccacaccgatgagatcaacgaggtgatcaaccgtatcactccaggaactctgactatcgccgtggtaagtatcaaaatagcactcaacgggctttccatactaaccttgcaccagataatggactcaatggactggttcgatcccgcagaggactcagcccctgcccaagctcgaactttcaacaaagccttgaagaagggcggtcgcatcctcctccgttccgccagtatcaacccttggtacatcaagcactttgaggaaaacggcttctctgctcgtcgagtgggagctcgtttcccaggtacatgtattgatcggtgagtttcggtatttggttcttgattacgttacggacgaagcttatacatattttctagggtgaatatgtacgcatcaacctggatctgtactaaaactgaggacttgtcacgcccgaatacagatcgcaaaatgtcgactctatcgttgggggaaagtgctatgattgcaggcaagatgccgagcagtgtggagagtctgttgatttaaattggcgataattgttttcccttgatgttgcctgttcatgatacctatgatctggagttaggtggagttagatagagtgtttcgtatgcttgccttcaaaagcgcaggggtcaggagtatgatactatatgaaataaccacaaaatacatatatttgtcgatcttacatacataaacgttcatgatttcaacgactattaagccaaggatccttcaaaagtttaaaggtagattgcctatcatctggatcccactgcaacattgttcgcataaattgcaggaaaagacgcctattttcaccttcaagatatacctccgaatcctctaacgataattcagggacactgacttgtcccttccattgacctgtgtatattttagacatgcccaaacggttttggttacggaagggagactagaacaccaaattgatcccaatacctttgacctcgaagacaatgcattggtgcttgcctttgggaccttctatttcgaaagaatcgagcatggtacgaataagaccattcacattgtgtctcgtttgtagctccgaaaaccgacttagaacttcgacttctcgattctttttccagtcgtgaatgacgattttcagggcaatatagcgatgtttcctaggctcggtttagtaagatagcaaacagtgcacgcggaaagctactgtaatttactcgatgtcacggcagagccaaagggttgaattcgctccaaagcccaatttgctgataacttggtacctagtctggaatgtatccccaaaccgaacaggatagaagaggcctatatcataagcaggcattcgctcctcttcaacctttttggtcggatagctcgatagggggatggatttcggcaccagaaggcgcgaccgaatccaaataaaagatgcttcaacgaaatcgggttgactattcggatttcaatgagaaagagacggctgattccgaactcgtagacgaaaaaagatggtcaagcaagaagacctggaaggaaggggccttgttattatgagagcatcgggtagtggcatcgattctctcaccgttctgtatgtaagcgacgcgactgggggtagcccctgtatgttgtacgctgaaggcttaagcgacaactagaatatatcaggaggcactgaaattatacagactaacggtttaatttgcggtactgtatatattgattctattcaagaggtcgaaagctaactaaatacgtatctctggctgtagactcataaccagagtggtagccctcgccaattccagtccaccgcaacctatcctactagttttcggcagaatgcgaaagattgcacagtaaaatgagtaagagggagacataaacaccagagcaaactcgtctagaaagccagttgatagtatctatggatatactaaggaaaatcaagcttaaaatctgccccattccgaaccttaggtattaaatcacggggccccacaactccgcaagtcacgaatatattatggagctgcttaggtacggcgtcgatccttagagagggttctagcggccgatcttcaggcgttgatttgagcacatttgcgaaagtagtctccatagtcaatagcctcttcccgcaagtcttagtatttactcgatgaatagatccaatattctctccattttcgggtcccatagacattggcacaatttatttttggacttggctatatctaaaccagcaaaccaaagatatgccattcgacttccaaggttgtaaatggtcttggtaagatatctcagatatctcctgtctggatctatagcaaatggtagacaaacatactgacggaccctgaaacagtgaatcctgtattcgaggacaccgctcgtccaaatgtgcacactatgaccgaccgatgaagagaatccctaaggttggacgtccgttagcaaagtgctcacacgtcaatggggctgattgcagttgtcaggaggcttgggcgattatggttcctcttgctccaggtacgtcatgtcatgccggagatttgggttagagatatatttgtagtaacgtttgtcggtttgaataggatcgatggtttgcagaccagaatctgagactcagccggtacagcagcagcaggtcgatcatgtttatgctgagggtatatgattatttttatcaatgagcatccttgttttataaaggaattaggcaaataatgaagtatagatgatattgtcattctaggatcaatagctctaattaggtatttcaccaagccccctttgtgagtcaccacacagcgctacgcagtgcgaggtaaagggagctaagccagaacttcaccgcaatcgaaactccaatcatccaccatgacaagtcccttcctgccagccagggattccctgagagaatcttccaagaagcagttcgcccaccaggacgccgaaaagcacagcaacgaagacgccgacgttgaaggtcatcacggatagcatcctaccaatgccaataattaacgattatccaataagtactaagtatacagacagccgcagatggaacaactcacaagaaatatccaatcaaagccctagcacactcaagcaatgcgcgtgtcccgtctttccacagactccacgttccactggccttccaggatgggaccaggcgtttcagggagaacctattccgagggctatcctttatgagatattccattgacgtgctttgtgtttcattgtcattgttcgagactggcaaattctcttcatcggggtcctcgtcctcgtgcacgcgcatgtagttcggaagaggactgagctttgcttttcggacgccttttcgtggatttactgaggcgagaagcagagttggagggggagaggtatgctgggaccatgatttctcaagttggaatttcagggcgccaagagagcggttgaagatggcgaggaggaatagaaaggtcaatgtgaagacatattgcgtcgtggttgaggttgtccagccagtgaagaggattgtgatttcagtggaggtcgagaacactgctggcatgttcatacccatgttcatgttcgcgctaggatgttccctccagtgcgaatgagagtcagagtcttaaggcagagttcacagtgttgtattactccatgttgaggatggtgagagtgggaagcctacaggcaacaggcaacagacgagacgagaagattagacattcctctttgctctagcggcatacaagcgcaaatccgctcatctccacatgagatgtctcaaacgagttagcttctcgtttgataaaccataaaaagaatgattgtaataagaaaaaatatatatttcaagttagtttattcattgacttcaggtctaatcatatttcacaggggaagaagactggaacacgccaaagcagcggccctctaagcaagtagtgattaaaaaagagtctgggaaaattcataaatggactaccatgagtcccgtgctttcacctcttatcatatcatgcccgtctgttgctcaccaagccaaagtgcgcatacagataaatgatatgcacatgcgaacgatcgtggatatagagtcagagacagaaaaaaaagcccagagaccgaaactctcatgaacggccataccgcgtctttccgaaggagaaaggcacgtaacggtacttaatcatatgctggatttgtcgtcgcactggaaaaggggtcaagttagacagatgtccatataaaaatgctataggtatcggagcgaattccgaccaaagggcaaacatactcgtcagcacaaacagaatgatccagtaaatgaccagcaccggccagaagacggggatatcgaagacagcgagccaggagcaaacgaagccaatggcgatggcgcgagtggccgagtgccagaacttgaactcaggcagacggcggatgaagggacgaaactcctcgtccttcttggtagggaggctgggggacccggcgtcaccgtcctcaagaccctcgtcctgggtgagagaggggtcgaacttgggagtcaggaaagcgaggaagaggttcaggaggtagattccgagtgtataggcgactgtgattcaagatcccagcgttagcggtttgtttatgcagatgtttacagcaccgcggatgaatggctcccgcgcgttggggttgaagcgcatcattttcgctttgctgattccatttataggggttcgatagagccataccgatgtaccagccctgcgcgaggaaaatgcgcaggaagaagaggcacaggagcacaccagaaccaacccagcggtaggttgtgtacggagtcgaggcatcgaggtaggcttgatagtgctgcgatcggcgtattagcatgctggtcggaccattcggctgatctcaggaatgaagaatcgaaagacatcgcgcaatgcctttgcccctcatgggacactcactcgagtcagtcgagaggtgtgcgccgacacggctgtgaagggagactgatcgggctcagggacatccatgatgaagatattagggagaagaagcaaagcacagggctggaccactgaaagaaagaaatgaaagagggaagcaaaagaaaagctgtgattaagataagctgctgaaaccagacattccaggtcaggcactgcacttccttcaggacagagaagtgtccactgcccacgggccaatcagcttagatgcgaatcactagccatcccagtgcacgtgatatgtggcgaagtccaagatgtggcggtgccgtgacataaggcagacgaaaagggcttagcccaattcgaatggacctcgggacggttaacttcggcggttaattttggcggcgttcagtcggtcgcggggaaaccgaccatctatgatgtatcgcgtcggtagtctctctcccttctctgcattaatttaacctcaattgtctgaacagaagtaattatatttttcttcacgtatcaaaatgtttgcccgtcaatgcactcgtctggccactgctcggacatcggtccccttgacttcctacctagcccgagtccggggttattcttcagccgctggtagttacgagcacatcctcacttcggttcccaagcccggcgtggggttgagtatgtacaatcagtcaatataatgccggccacttctcattgctattatagttacccttaaccgccccaaggccctcaacgcactattcactcccttgttcaaggagcttaacgaagccctgaccaactatgacaatgacaagagcatcggcgcgatcattattacaggaagcgagaaggcctttgccggtatgtacatgtcctatttacacttttcacatcctatcctctcccatcatgcctcgccctaatcctaaagtacgtcaacaatactaatccaacaaacccaccatagccggcgccgacatcaaagaaatggcccctctaagcttctccaaggccttcagcgagaacttcatcgcaccctggtcccacctcgccacctccatccgcaccccagtcatcgccgctgtctccggctacgccctcggcggcggctgcgagctagccctgatgtgcgacatcctgtactgcaccgagaccgccaccttcggccagcccgaaatcaagctgggcacaatccccggcgcaggtggatctcagcgtctgacccgtgcggtcggcaagagcaaggccatggagcttatcctcactggaaagatgttcagtggtaaggaggctggtgagtggggcgtcgcagccaaggtcgtgccgggtggtaaggaggagctgcttgaacaagcctacaagacggctgaggctattgccagccatagccgtgtggctgttgtcgctgctaaggaggttgtcaataagagccaggacttgccgctcaaggagggtattgagtatgagagacggttgttccatgcgctctttgggagcaaggatcagaagattggtgagttggcacttcggtttgctgagtgagtgggtttgctaacggttattctaggtatgactgcctttgcggaaaagaagaagcccgagtggtccaacgaatagatgacaaagtcatttggaatgaagaagctggtttttttcatcgcttgcgtgtaattcacgctgaagctgtagaacagaggattagttataagacatagaacagtatcatttaactcgcttgtgcctgtaactctcgactgcaatctcatatagctgggtgcctcatccacgttcgtctcatcttccaaattggcattgccggttgttccgtgattttacttggtcgaggcatactaatacgaaaggtcatatgtcagattgagggtcgagaattgccattgatgtaagagtggaatccggactaacgccaggtgcccatgaatatgcaggcaatgggctcttcagtgctaaaaaaagaagtggagatatataagaaactgcagtggtttacatcaggagcagtgtgactttattttgtttgatcatcatggaaagatattagattactactgctattctatttgctgaaaaatgctatatacatagggggcctatcaagttcgggcccagaagcagaattaatcgtaaacataagatacatcgcatcatatcgaaccgtgatttttctccaattcgcattcatcagttcgggtgtttttatttgcccggtaatcatcaatgacttggctctcaatggtctcatcaaacacatccacttgggtggtcgcaaacttgcgagcgctgacaccgcgctcgaagagcaggtcaagctcggcgaacgtgcggccacgaggctcgggaacgcggaagtacgtgtatatgatgcacaggaagcagatgccaccccagaagaaaccggcgtagttgccccagttccaggcgccggggttcagcatgtaaggggtcagaacgccgcagacgatggcgacaatgttgtacaggttgcggcccagcacgactgtcttgatttgcagtcggcgggtggaaagctcggcaacaagggagaagcagaccgttccaacggtcagctggtagaatagggcccagatcaacatcattgaaccagtggccagggagccttggtctctgtgttctttgggaacaaggccaaggaaacccatgaccaatagcatggtgcacagaccacagagaccgtacagacataatgtccgccggccgattccgagtgtcataaggaaccatgatccgaaaacgccaaccatattgattccgtattgacccatagcaaagttgtaagagttagaggagtctaacccggcctgttttaagaagtaggtcgagtagttggaaaaggagtttccactgagattttggatggcccagaccatacagacaatctctgtgcggcggagatcagtgccccggaagcaatccaagtagctcgcaccctgggtgattttttcctccagggcggtcgtatgaaccatcatagcgacagtctcatctggatcgaaatccccatcttgtccctgacttttggtagtcaaacggagaagggcccgtttcgcatcttcagtgcggcctttccgaaccaaccaccatggggattcgggcgcaagccaaataccaacgaagagcggcagtggccacatccactgcagtccgtacggaatccgatatgcccattcgtcctcccggttcaacatgcccttaatcacaccgataccaataagctggccaagaccccagcagaaattgacataggtcgtcaaataccctcgcagcgccactggacacacctccgaagcataggtgatcgtcaaagtctgaaagacaccccaaggaataccgcagagaatctccgctgcaagcagggcatgcacattcttagccgtgaagaagatcgccgtccacgcactaacaagtacaaggcaggacataatcgtgtaccggtagccgaatcgttctgaagcccagccgttgatgaatagaccgatgatctcgccgcagtaagcaccgttgctcagacctgcttgccactttatgtccagagaattgtcagtttcttcatctcccaaagaggcaagtccaccccactccaagagatagaggaatggctaccgccggaattggttgaacttaccgcagcggatacttgatatgtgccatcggccagcatctcaccatatttgcgattgaattgcgggaaggcgtagaagttgttgaccaaactaatatcgtaaccctccatggcaatgcaagtagagatgagcacgctccaaaaaacggctttggggtacaaccggataccctgtatcaatgtcatagaccgttccttctccgtggctgcctttgcattttgaatgaccttggtcgtggatgagtccgagcccggtccagcggctgaagagtaaccatattcgggaaagacatccaccggcgtgatggcatctgaggccttgggttcggccatgttggatggacgaaataaccgagatcgctgggaggaatggaaggttggctcgagcaacttgcgatatgggtttgagagttggcccggttcggaagtcaggggaataaaaaatcaaagtacccactatgccaggaacattgcacgcaggcactccacggcagcgaaaagtttccttgacgcctaccgagggtaagtgaatacggcagagacaaaggagcttgacaaaaagaggataaaagccaatggtccgaattggcgggggaacgggggatttgacgggcttgatcgcctccaagcgcaaattttggcgggatgagaagcttggcggtgcccggatggggcaagcgatgggtcatcgtccgaacataattcgatattcgagtcgtgctatgttcgggcttgattggtctagtattttctgatcatacagtcttgaaattatactaacagtacattttagatgtaactagatgtagtatgactcatgagtctgacaaccccacgtgggggaactataaattccccttgcagtaatcagaatgttctatatcaaacttctagtagtattcttattattttatatatcccataccgggttcagtatgtatctcattggcaataattagccaaatattgatctactttcaggacctgcaaatcctaaacttaagcttctctactgtaaaccgcggacctgtgaattactgtattgagttagttttgcctctctgggtttagcgccccaatacaccgtcacgtaacctcccctcaatgccctccgatatacataaaagaccaccgaaagtcaggaagcaggcaaggcaatgggcgaatggggagtgcgcatgaattacagtacgggtccttcgtatgccaatctgattgccccgagatggctcaccgacctgtcggacttttaagccccgatgtccgactatcagatcggtggccgagaacatacgtgccgatatgatgatgtataaatttagcgatgtgccaaacaaaaagcctatacaattttgttctcccaaagacatacgttaacagcccttgctctgatctcagcttctccctttcttattgcacaactgccatgtctcatcctatcttgattatcggtgctgggcttggcggtctttgcttggcccagggactgaaaaaacgaaacattcctttcaaactatttgaacaggacggaaggcatgatcttcgaactcagggatatagattgagggtgggaagtgagggtatctacgcccttcgggataacctgtcgcctgagctatatgctctgttcgagaacacctgtgccgaaacggtaatggggggcgtgagaatcaaacccgatggtacactactaggcggcactggccctcctaggccccttgggtcggctgcttttatcgagccccagactgtggatcggagcactttccgggaggttctgctgacaggtttggatgagcatgtgttttttggaaagagcttcgaccattacactgtgaacgacggaaacataattgcattctttgcggatggctcgaaggaaactggatctctccttgttggtgcagatggagttcgatctagggtccgcaagcagtacataccagatttcatgggtatcgacaccggcatgcgcatcatctttggaaagacacccttgagccccgaatttctggctcggtttcccgaggcgtaccaccatggaatgtctcttgttttaaacccagacgatgaatcacggaccaccttgctatttgaatccatccgtttcccacacgcagaaaaagtctcgaaacctcagcttcccgacccatacgtgtattgggtgcttgtcactcattcctccaatatctcgtcgtcaaatggcacatcctggccattaagcccggaaaagtcagctgaacttgctcgacatgttaccaagtcatggcatcctgacttgcaggtgcttttcgagatgcaagacgaggctcaaacttcaacccgattgatgctttctgcctcaccagagttggcctcctgggagccctcgccccatgtgactttactcggcgacgcgattcatcccatgccaccaactggagcgatgggggccaacactgccttgcgtgacgctgcagatctggctcgcaggcttgaggttgcagtaagttcgcaaaccctcggtcgacatgtcatcggggagtatgaatcggagctacgggattcggctagaacggcaatcgcattaagctggcaaggtggcatgaaaggcttcaggctcaaatcagccgtggaatgcaagaagatcctcttatgatttcgctttagctagtattgaacttctctcacctctctgaactcctagctgttccctctttattgaatgtattgttaaggtatcatgccgccaaaacgaatcttcctcggtgtcatttttaatctcccgattattggctgctactcatcactctatgcggtagtgggtataggtcggccggtcctggttatagactcttccatcctcctatttggacagtttgagctatggtttggggtggccggctggcttgtgaaatagttaacgtaaaacgcggacctgtgaattactgtatccggttagttttgcctttttgggtttagcgccctaatacaccgtcatataacctccctcatgccctccgacatatgtaaaagacccgtcttcgctactcatcctcccctgacagcctgacaccgctaggtaatgcaaaccctgcaaacacttcaagacttgagtatctcgcttgtttcgtcgtgcagtcccttacgtacatataaatgcgtgtatcagaatgtctgccaaactacctctgatcaatttgaacaaacctgtatcatccactctggcctctgacctgaagcttgcccttcgtcggttcggagctttccgcctagtagtagcccctgaaaccaggcaacactgtcccgacgttgtcattgaaaaggcaggctaaacccactttcctggaatagcattcatcactgaccgcactcctcaggcacgggagttcttcacacaaccgattacagctaagacagacataaaaggatactctccttttgcttcggaacgtgttcgcggccgggctgagatacccaaagagagtatctattttttccgacatggcgccgaaccgaaccatctcaaggggccctcttgcaacttatatcgttcagtcaaatctcttcatgaggtaaaccgtccttgtcttctccctctttttctgtatcgtgctgattttcctttcaaggggtggacacctataaggctgcaattgttaaagaccatatcgcaggcactggactcggacacttccctaactggtactacgcttctcgattctgctactatcgggatacactattatgattctcgaagtcttcctgactttagcgcccatttcagtccccctcatatggatagcggaacattaaccattctattccggtctcataatgagaacgacggcctagaaattgctgatctcgaaacaacagagaaacaagacagtgaaggggttgggtcggaggcatcttttatgcacgttcctacttttggcgacgatgcccctgaggttgtcgtctttgcaggcactagactacagcgtttactcggacgcgaccgagttcgagcttgcgtgcatagagtccgcggaccaggcccggaggcgcacaataactctggtgtacaacgattgagcatcgcaatgttttgcgctccatctgggccatcaacctcaccgccctcatagttcataaatcgtattttaagttgatgagatatctagatgcagcgacgtagagtgaatccacgattattttgagtataagagcacaagcaagcaaaagtacatctacaaacgtgctggcggggcaccagtaatatgagcatccgtagaagactggatacgagcaccaagatctgcgttaacacgacggaacatctcgtaagtagcctttcgaacacgctcgtcagcgccgcacagatgaccagagatgttaccgacaaagttctcctgctggccaggggtacggccaaggacctgccataggccgttagcctggacgtagtcctcggaggtcacagggtactgctcggcgatgacagcaccagaccatttctcgtgttcctggctagccttgacaggcttgtaggcgagcggacggaaagtagaagggtagttggggttggcaccgtagttgccgttgacgttcatgtagccatcgcggtgtgaggggttgaaggctttgagtgggcagtttacggggatctgctcgtagttgccgcccaggcggtggcggtgcgtgtcggggtaagagaagaggcgggactgaaggacagggtcggcggagggctcgacaccagggaccatgtgggagggggagaaggcggcttgttcgatctccgcgaagtagttctgcggattcttgttcagggtgaagcggccgaaacggcgcagaggcacctcattctggggccagactttggtcaaatcgaagacgttccagcggaacttttcggccttttcggggctcaggacttgtacgtagcaggtccaagacggattctcgccgcgctggatggcctcaaataggtcctgggtgtgccagtcggggttctcggcggacagcttggtcgcctcatcgttggtcaaggttttgttgccctgatcagacttgcaatgaatctggacgtagttgaaggtgccgtctggcttgatccacttgtaggtgtggccggagtagccattcatgtgacggtatgagtatggggtaccgcggtcactgaacaggtgcataacctggtggacggactcatggtgggtggagaggtaatcccagaacatggtggcatccttgaggtttgtctgtgggttgcgcttttgagtgtggatgaagatggggaatttagcaggatcgcgcaggaagaaaactggggtgttgttgaacacccaatcccagttgccctcctcggtgtagaacttcatggcgaatccgcgagggtcacgggcactgtccggggatcccttctcaccaccgacggtcgagaagcgggtgagcatcttggtcttcttgccgacacccttgagcatatcaatggtcgtctatgcgttattagcctagtattctctggggaagtatagaaactgcctacatacgagatcgctaatgtcatcagtgacctcaaactctccgtaggcgccagcacctttggcgtgaactacccgctcaggaatgcgctcacgg
